United States Patent Application Publication US 2008/0300147 A1 - sequence listing, part 3

SEQ ID NO: 766 - DNA, 127425 bp, Homo sapiens
gatctacttaacatctactctttgagcggatttcaggtatacagtgaatcattaactatagacacagtgctgagatttgtgacagaacagatggaaagactttggcagcagcattttggagattctaggcagggcccgtaatttatcctgtcccacattgtagatgttcagttgctgtcagcccaattataagctatgtgaggacaaacaccatgtttgtttctctcacatttatatgggcacagaagatgtttcctagttgttgaaagacaactaaaacataggtgcagcaggaccaaataagagacactattaaaaaataaaatttaaaaattaaacctcttggccgggcgcagtggctcacgcctgtaatcccagcactttgggaggcagaggcgggcggatcatgaggttcaggagattgaggccatcctggctaacacagtgaaaccctgcctctactaaaaatacaaaaaattagccgggcgtggtggcgggcgcctgtagtcccagctactcgggaggctgaggcaggagaatggcgtgaacccgggaggcggagcttgcagtgagccgagatcgcgccactgcactccagcctgggcgagcgagactccgtctcaaaaaaaaaaaaaaaaaaattaaacctcttttgcagtgtatttcatgtatttttaggatccatttaagcaattttacattactcgtaaaacatctgagataatcatggaagcacaccagaaaatgtgatttttcttgaaagaagagagattgattttgactcataaaattaacttgaaacacttctcccgcaaatagctactaaattgcattcagagaaatctctttgggaaaccattactatgtgcacttcatcgttaggtaattagcttgatgttagcttgttcaattcatgccttatatcctttgccttgaataacactttatttaagaagctcttgctccaaagaaaccaactgtatgatgccattatcagtcatttacttttttgtagcagtaaaaaagaagaaatcaaactgctatgaaagctaaagaaccatttcatttcgcttttaatttcccattctttgaaatgggatgaagaaacttcatttagtgtatacttataaagacttgctaatgctttaaggaaaaccattttatctgcatgtcactattcaatatcttatttcttatttttcatgtgatttttgcgtatgttttcctaatttaaaaaactatattaatctgcctttaacaagttattttcagttaaaagtaataatctttttggatgtagctggagggaaggaattaatacttcagagaagttagatcatgtttattttaaatagtgagtaataaaattttcattaatgtgtttaaaaataaccttcacatgtaccccataaatttgtacaaatataatacatcaaaaaaataaaaataacaactacccagacaaatttaattcaaaatttttttggccattcccttaggaaaccaactttctgtttagtgaaaaagaccactatagtatggagcctttatcactagaatgcagttgaaaatagaggccttgttttttgtttgtttgttttttgtagttaaatatgcaggtttatcgcttacgtttttgctttcagagaattcacaatggcagaaattgagcactttgtagatcccagtgagaaagaccaccccaagttccagaatgtggcagaccttcacctttatttgtattcagcaaaagcccaggtcagcggacagtccgctcggaaaatgcgcctgggagatgctgttgaacaggtaggattctggaggtaacttaacttagattgtgcctgttcagggtttgcagcaattagcaaattctatgtgttctgggtgacaagatattttattttggcagtcatttgcttttttacagtacttggttttgtacagaatttgttatacagtattattatagtaagagaaaaatcacctgaacatctcaatttgtgggccttggggctagcatgaaaaaaaatgtttagcagagcacttggaaaatagatcttggtttgcattgtgcctcaccaatctgactcaacagtatgtactactttgggggagacagcattggacccacagaaagcaagccatctgggtttcagactcttctgtattacccatagcagtggaataaggccttgcatataagcactttgtaaatatttgcctggagaagtgagtgcgtgaaaacttgccaacagtagctgctgtccactagtggaatgagttgcctcagggagcagtgagcttcctggccctgaaaatactcctggcaaggttggacgatagcttgtcagccactttgcagagaagacctctgcagtgtatggagatggggctagatgttttctaaggtccttgcaaacactaaaatgattacgtgtactctacggggttcacaaatttcagtgggtaaggatacattaaaatcccctcaacgtgtcattactttggttaattcagaggggaatgtctttgccattctttagtgtcaattatgaatattgtttttagtactgtagatttagaggtatgaggtactgggctgaatttttgctgacccagtaagtatgttggacagattttgaataactccattatcatcatcttgacattaacccattaaaaaataaccaagatctcattctgagtatttgaaattgttttgaaagcaagataaaatagtttgtgttgggtgtcaaatatttttcagtagagtgagtcaatggaaaccgatatcttggctttgaagagtattaatgtgtgttttcttttcttcctccatgcttgcttattggttggtttagggtgtgattaataacacagtattaggctatttcattggccgcatctacctctacctcacgaaggttggaatatctccagataaactccgcttccggcagcacatggagaatgagatggcccattatgcctgtgactgttgggatgcagaatccaaaacatcctacgtaagtggagtgctgtttaccatgtgattttcacattgttaacttagaagcacaggtaccaaatgaatttttgtgcactttatgtcacagaggaacaaagggaaaagaaaagagatcttttcctgagcaaaacagaaaaagcagttgcctcctgcctttttataagtgtcctaaggagctcgttgtagtcttagatagctgagagacagagttagtgtatgatgggacagtgcggatgtgtacactgctgtacagtgtattggcagcattactggcaatatcctggagtggatctaagacacattggcctctccttcctggcaagagtcccagcaaacattggaaatggtggagaggttgaataaagaaagtcatagtgctcttagctcaatgagctatgtagtagctttggggaatatactagttgattctgatctctggcttaagaactaccttcctcaaatgttatgtatttaactcaaaattcacagacgatctccaggtaccctcctgcccctgtgccctgtcacccctccagcctccaccaccaaacatgaacatcagtattgaagcggagggacgaaaggcatttgcatataggagatgctgtctatattggtggcaggaggaaatgtggcatctaaaacaaggctgagagtcttttggcatttctcttattgggtgttagagaggcttcctcgcctacatagaaagagactttagtccaggggtcactggttccagtatacccttggttcagtttttacttttcagaatggctttctttttatggatttttaaaaattaaaaatcaaaattagtcatattttaaaaagtaatgactactttttttaaaacaaaaaggaaaaaataattctgaagactattatgtagaaaattaaacttccagttatatgcctctccccaggtgttttatgtctcttctctgtattgagcaaacattttctataaaggaccagatggtaaatatttttagctttatgagtctctgtcacataactttgttgttttttacagcttgtaaaaaacagcttttaaaaaatgtccaaactggctgggtgtggtggctcatgcttgtaatcctagcactttgggaggccgaggtgggaagattgcttgagctcagaaatttgagaccagcctgggcaacatagcaagaccctgtctctacaaaaaatacaaaaattagccaggtgtgatagcacgcccctgtagtttcagctacttgggaggctgaggtgggaagatcacatgagcccgggaggttgaggctgtagtgagccatgattgcaccactgaactcaagcctgggtgacagagtgaggccctgtctcaaacaaacagacgaaaaaagatcatgcttagctccatggtcttgggtatgtctgccttctctagatgatttttctacgtgttctaacacatgcatgcataaatgcataataatatgcatatgtttataaatggctattaatgatgttgtttttaatatattctttttcccttgtggaattagaaagaattactgtaatctgttaggattttcttagcaagcttgcttgacatatgtcaaaatgataatagtaattatttttaggattatgggtgatcattaatttctttacactttttagattttctgggacttctttttattttcagatcaaaccaataaaatgtttttccttttgtatgagaaaagattattacttttctttttgtttcatacccagctccttctcttagtttgctctgattctgatttcagattaaaccagatgttgttcttgctgtctcagttaagtaatttgcttaagtctcacagccagtgagtggtgaggctgggatataaacctggctgtctgacaccagactcatgctcttaacagttatgctgtactgctttataaaccccactggatgcctgctcgtccttatctaagtgccattgtgagggttagggatcagaaaatggaaagtcactggaaaacagggctaaatgaaacaagaagctccagagtcccagaggctcttaaggagaggggagaactcccttagagagtttaatactttttgtgtactttatatatttttttaataaaaaaatttaccgttgcagttaatgccacaccaattctctttccatccagagaagtaaccactatcccaatgttgttattctcaggcacgtttttgtaattttacctttcagtacataaatgttagttgacatctgcagtaaattataaccaccaaactatatggttaagaacataagtatacttaaccagtcgacatgtatagggaatgtcagattgccaggttacatgtttttaggctttgttctttaattccttttgttgttgttttgtgttggagtttctgagctcatatgagttttatatttgcttgctttattacagacaccccatgtgataacatgtgcttggaaagcttagtagttttttctttttttctttttttttttttttttttgagacagagtcttactctgtcacccaggctggagtgcagtggtgcactctcagctcactgcagcctctgcctcctgggttcaagcgattctcctgcctcggcctcccaaatagctgggattacagatacatggcactgcacccagctaatttttgtattttcatgaagacaggatttctccgtgttagccaggctggtcttgaacttctgacctcaggtgatccacccgccttagcctcccaaagtgctgggattagagacacgaaccactgtgtctggccaagcttagtagttttgatggttgaatttccccaaactctttggatcaagggcaaaaaaaaaaaatgaatcttcttgagaaggactaactaggtatctaccaaaataagctctttacaaactcttgttcttattgaaataacgggttcttaagagtttgtcatagttggggtttctataagaaagcaccacatacagagtggcttataaacaatggacattgatttctcaccgttctggaggctggaattgagagatcagggtgccagcatcgtctgatccttgtgagggccccattctcagtcgcatactgccaacttcttgttgtatcctcacatggtgaaagagggcaagagagctctctggggtcccaaattccagtgattagggctccatcctcatgacctaatcacctcccaaaggcacctcctcctaataccatcacattgggagttaggatttcaatatacgaattttgtcaaggacacaagcattcaattcattgcaggttctttgaaaataatttaaattttgctttttaaaagtatcttatgtgtgtatttataagaaagggaacctggcatcaatgtgatcataatgctcttatataattttattgtgtgacctgaactttacccactcttatactgagttttcttttgttcagtgaagaaagtgaattgaatccaaatgcccacatttatggccagctgaagtatgtgtttagtcagccatctgatatcaagttgtgagaacactaggtacttcatctaaagaatagtggtttctgccaaattcattttgatttctgttcacaaatttgaaccaaatttacaggctttgtctaggttcacatttaatttccataattaaattccagaatatgttagtttaccccacagactcagtataacaatataaatccatccagaaaggaagactactttgtgtacagtgtgaattatatatttttttctttctttttttttttttttttaagatagggtctcactgtgttgcccagattggtctcaaactcctggcctcaagtgatccttccacctcagcgtcccaagtacctgggattacaggcatgagccatcacacccagatcagtgtgaattatattttataggcttattagctgcctgatatatgaggctattcccatttcaaatatttatgaaatttgaatgaagattatatcatcgaattatcattgaatatatgaaaggtttataatctgcatgcatttgtgaatgaacccaatataagtaataataagtaagtaatgtttttattgattatatctttttagggttggattgagattgttggatgtgctgatcgttcctgttatgacctctcctgtcatgcacgagccaccaaagtcccacttgtagctgagaaacctctgaaagaacccatatcctttctggtcactccaaaaactcaggattcacatgtgaacatcttgctaatgaataagtccaagtctttaccttgttctatggataaatggagatgttttagacactgtagtaacgcttgtttaaacctattattttacctatccctttgttcctttcctattctctgtacttgtagtctgacgtgtgcccactcaatgtttggcctttaaaagaagcatatttagaaaaatgctctgaatatctttcagaacgttaatagtttttctcagctgtttccaaaacgcacttcacacctgcacctacctacgtgctctttaaataaagggtacctggtgaaagctttttccattaaaagatgagtgccatttgatagtagctgaaataataatttagctcacttggtctgaaaatcagcaaaatagaaattttctttctttagtaggcagtgaagttatgagctgatttcttaggggtaggtcagtgacaggaaatagatcttgttttgagcattttagaaatacttatcagaagttcttatgctatgggttgggtcattgctgattagataatatctcttttttctcactgtaactggaaaagtttctattgatggtgttaattttggatgagagttgtctgaatgattttgtggacaggtgtttcatcttgccttaaaatcagcataaacaggatctggagtactgatagagagctggcatggttttaagttgatgattgattgttctcaggctcattttctgaaatactgaggcagtgctgtagttttggattccttgactacttcatacaaaacagtcaatgttgttcagtttgaacccagtaagggagcaattggtaaggcatataagaaggatgcaaaactggtgatggagtatcttgccatttgtgatgagtgctacattacagaaatggagatgctgctgaatgagaaagggtaagatatcagatgtttactcttccatgggctccagtcagttgtgtcatctgccaggttctgaaaggatgagattaatttcttaagattttttgcaggtaagtactgtatcttggctgcatttaaaagactgtctttgccgagattttggcattatagcctgaaaaaagatttgaaatagaatatactttttttttttcctagtaactgtcttaaacaaagagacttgtccagccaggctgaggaaggaagggttagaaactacatctactatctctcaggtcacttctctctcctttttggaggtttagaatactctctgtaattgtttaagcatgaatataaacaatagagaaggccgggcacagtggctcatggctgtaatcccagcactttgggaggctgaggtgggcagatcacgaggtcaggagatcgagaccatcctggctaacacagtgaaaccccgtctctactaaaaatacaaaaaaattgtccgggcatggtggcgggcgcctgtagtcccagctactcaggaggctgaggcaggagaatggcgtgaacctgggaggcggagcttgcagtgagccaccatcgtgccactgcactccagcctgggcaacagagtgagactccgtctcaaaaaaaaaaaaacaaaaaaaaaaaatagagaaaagcctttaaagaaatacaacaaaatccagcactgaacagtgtaaaacttacaatatccagcaaacaataaaaattattatatatatgaaaaagcaggaaaatgagaagtaaagtcagtcaaaagaaacacccagaaaaaacaaacatgatgcagtaagtacataaggatgttaaagcacttattataaatatgcttcatgtactcaagggtgtaaaggaaaacattaacatgtgaggtgagaaatggaaaaatatatgtgtaatatggatataaacacatgttttttatatatataaacaacatgaaacatttagaggcaatatctcaaatgaaaatgtcactggatgggattaacagtagattaaacattacagaagaaaggtcattgaacttaaagacatagcaactatccaaaatgaagcatagaaaaaaatgagactgggaaaaagatgtccagtgggacaatatcaggcagtctaatgcatgtgtaattgagagtcctagagagggtgtatagaaaaaatattatacagtagctagaaaatttacaaatttgatgaaaacgctaaaactacagattcaagaagcttagccccaagcaggataaacacgaagatgaccacatgaagacccgtgagaatcaaatagctaaaaaccagggatgaagagaagaacctttaaagcagctagtggggaaaaagactcatcacataaaagcaaacaaagataagaatgattagaattcatatcaaaaactgcgcggatcacaatataatggaatgaaatcttttaaagtgctttaagacaaaattcctacacccagcaaaaatatctttcaaaaatgaagaggaagtactttaagaccaagcttgttcaacctgcggcctgcaggctgcatgtggcccaggatggcttttgatgctgcccaacacaaattcgtaaactttcaaaaaacattatgaggtttttttgcattttttttttcttagctcatcagctgtggttagtgttagtgtattttatgtgcagtccgagacagttctttctagtgtggcccagggaagccaaaagattgaacacctctgttttagacaatccggggctctgagagtgcattgccagcagacctccactatgagaattgttaaaggcacttcttcaggcagaagtatgaaagtttagatgtacccagaggacttgagagatctagaaatgataaatatgtgggtaaatagaaatggcattttctctgtcatctcttaatttctttaaaagataatggagtatttaaagtaatatggaatttataacatggaagtaaaatgtatgctatcagtagcacaaagggtgggagcaaagaattgggaatatactcttgtgaggtgtatacattatatgtgaaatggtgtaatattacttgaagataaactatgataagttaaaaaatggatagaatgaactctagagcaatcacctggaaaaaaaacacacacaaaaaaggggtgtaactaataaaccaatagtggagataaagtagaataagaaaaaatattccacaagaagatgggagaaaaggaaaaggaacaaagaacagatgggacaaagatgaactcttgcaagttgaagatacctgtttcagaaaaatttaaaaacatttctcgtcttccagaattaacatctatttatactaaaacaatatcaaatcccattaaaatggactaagttatattactagttaaatatcattatccataaacacagtttgctttattaattattctcaaataatggctgtctccttgtcaattacaactcttttttttttgagatggagtctcactctgtcacctaggctggagtgcagtggcgtgatctcagctcactgcaacctctgcttcccaggttcaagcaattctcctgcctcagcctcccgagtagctgggactacaggtgtgcaccaccacgcctagctaattttttgtatttttagtagagacggggtttcaccttgttgaccaggctggtcttgaactcctgacctcaggtgatccacctaccttgacctcccaaagtgctgggattacaggtgtgagccacctcgcctgacccaattgcaactcttttatagctgttaactatgatacacttagactgtgctcacagagagaatgcatgtgacactgtgtatgtaatggaaccttgaatgcatgcacacacagacttcagacagaatagtaaaaacggaagaattcagtgaacaccagtcagatgaggcatgagattatcacaggtggaaactagcaaaatacagttataacatatgccaactatccagcttctgagacaaccacatgagggctctctatcctagcactgaattgcttgggagggaggagaaatccaaatggatattcaaaatgtgaggaaatacctcctaagctgaaatacaggtattacatgaagctctttataaagatgaattcttataacctgaaactgaatgggcatatctcaggacacaaatacatggcagccagtgattttgagggggataatattttatattgccatatgaaacagaaacattaaacttcttttaaactgatcttcatcaacacaaatgtccaaatttattttgaaaatagtgtgggtattggattgtaaaattacttctgtaagatggcatgctggttcatttgtacatttgttgggacagtaatgagaacccttgtgtttttaccagcaggcctatttctgacaaagttgttattattctaaaactgaattttcaaaaagttgtttttggttttaccttgattcaaaaccaaaggaatttgtcattaagtcacttgtggagttttataaaactagtcaaaatttggtgtatgtcctcagagtactttttggtgccattgttagactaatgcttaatttggtgtttcttatgaaataatttaaatttgacatcacttattatatctggagagttgatcaagttataaaaagaaaaaacaacttagcaatctacaaaattcctttaaattaaggcacagggtgcctgtttgaactaatacaaaatgtgttttgtttcttcgtagggaattcacaattgaaactgaagggaaaacatttcagttaacaaaagacatgatcaatgtgaagagattccagaaaacactatatggtaaatttgtaaaaataataaacaaaaagtcactgctccttaaagcttttgttgttgtttgagacagggtcttgctctgtcacccaggctggagtgcagtggcacaacctctgcctccccggctcaagcgttcctccctcctgtctcagcctccgaattagctgggactacaggtgcaggctaccatatccaactaatttttgtattttttgtagagatgaggtttttgccatgttgcccaggctgatcttgaactcctaggctcaagcagtccacctgccttcgcgtcccaaagtgctgagattacaggcatgagtgaccacgcctggccctcattccctgtcttctttggcaaaataacttgttaaaaagtcatttaggggccgggcgtggtggcttacgcctgtaatcccagcactttgggaggccaaggcgggtagatcacgaggtcaggagttcaagatcaacctggccaacatggtgaaaccccgtctctactaaaaatacaaaaattagctaggcatggagacacgcacgtgtaatcccagctactcgggaggctgaggcaggagaatcccttgaacccgggaggtggaggttggagtgagccgagatcacgccattgcactccagcctgggcgacagtgcaagactccgtctcaaaaaaaaaaaaaaaagtaatttagaccagtgatgttgcatgcttttttaaaagttaagaagatgtttttttgtagaacaaattctgtgaattaggcaatgagtaatttggagcacgtatgaaggatgctgaagtttatttgtggctgaattgaaattcctggaaacggagtagtaatgggtgtttgagaagctactgccagtggaaagagtgagcatacctttccttttgttcttggcttgtcttgtagccaggcttcagtgagcagtgttaggagtaagcgggggcttctccatcacactctggggcttttccgtcacagtctggggctttatagccatgatcctggcagctggttcagagctgcacatcaccattactcagataccacagaaggatgggaggaaaatgccttgatcatgtttctaaagtattaactctttatcatagacaaacaggctctcttttcccatatgtgtgtgagttttggtaccaatgatctcatttcccaaaaaacataaactcttccaaagttatgaccagttatcttagacctggacattgcttagcagtgcttcttcctttccacataataagtaataattatcagtatatttcctgtgtataccacgggtgttgtcttacccacatgaagagctgtgagcccctgtaagatgtctttgatggagtgctgttctttgagcaaactctcccctaagggcgtcctgaccccagaaccttggtgatacaatgccagtaatttggttctgaacaagttcttatcaagataacaagctaaaaagttaaacaaatacaaaccatgtaatactttttgcatgtaggaattgtttttgtgaattttgccagctgtgttagattttaaattctagcaaaatcttattaaaagccttagattttttatgctttctgggtagccgaggcaggtaatagagataaagtgtagctgctgctattcgtagtttgctgactggtgaaggaatattctagtacctcaggtttcatttttacacagtataaacagaatttggtgaaaggttttttcactccagctttctcttcaaaggcatgtttcctatcagcaaatagtttttaggtatgttctagtttctttgttctgatatacagagataaaaatccatctagaatagagatatttttagtgctaagaatttttttcttttcttttctttttttttttttgagatgaagtctcgcccttgccttccaggctggagtgcaatggcacgatcttggttcactgcaacctccgcctcctgggttcaagcaattctcctgcctcagcctccggagtagctgggattacacgcacctgccaccatacccagttaatttttgtatttttagtagagacggggtttcaccatgttggtcaggctggtctcgaactcctgacctcagatgatccacctacctcagcctcccaaaatgctgggattacaggtgtgagccaccgcagctggtgaattgtttagagagaatctgaaatgcattatgtggtatttgagagaatgttattgaatttctatctctttttcagtggaagaagttgttccgaatgtaattgaaccttccttcggcctgggtaggatcatgtatacggtatttgaacatacattccatgtacgagaaggagatgaacagagaacagtaagttgttgtgtacagtgtgctgttatagtgtcagaaaataaaaattttctgaattacattgtgaagtacattaataagactctagaatggtcaattagttattactataatctagtgctattaacactcatctttgcttaagtatgtatagacaaaccagtttcctgtgttatcttatttgagctttaggttattctagaagctattgttttagttgcctggtgctctctattcttagactgaacctattactttggggaacaatctatattatgtcaatggaaggaatggtactttctggatatgctgtgtttcagaaaattgggaaggatgagataactcctagaatttagccagaccactaagctgtatctgtactctggtaaagtatcaaagggaaccctctcaaactgcatgaaattgtctggggtacttttggggtaaagatgtgaattcctaggttctactctggagatgctgattcactaggtctgagacccagggatctggggtttttttaaaaaaaataagaatcctgagtgatttcactgtgaaagcttgacagatcataaatgggataatagttgtctggggtatagcctttcctagcattcaagtattgctgaagatagaagtttataagaagtcttcatcagctcccacaaattttcttttcggtctgatgcttctgaatcactgctccttgccttcttcctctttatctccttgccttacttcaccatttttacctcacctctgcctgcagaagttacactcctgggcagattactaggaaagccaaccagaagaatggctagaaaggagaggttgtatatgtcaggttaattgaaagaaacagcgtcatccacttggccattctaaagcttgagtgtacgtaatgttagacatcaaccgtgtggttctttctaggacatttaacctcaaagaatgaactagtgagttctcggcaccagtactttagtctgacacactattgtaatacatagctaataaagttagtatggtactctctgccctaaagttgcatcttcatttcccaaccttgaaggagcagccctattcattcaacagattgtaagaacctgggctaggccccaggtgcgcaaacataaggcttggttctttttgagaaatgatgacaaacataactgcatgtgttctttttagatgtcaagtctgcttcaagctttgtctgcttatttttctaataaaaaggttttagaaaatcttttagctgttcctttgaatctaacaatattaatataactagagctttaatagaaatttcgtaagggctaaacaagaataaattagtcacagtgttttatgaattgcatgaattcccatcatgaagagaaatttgattaggctgtgggaagccaaaaatgtttctaaattattagcacctagttcctcaatccatttgcctataaatttggtataaaaacattgctagtgaaattttaaaaattatttttctataaaggcaggtccctgttactctcttatattaaatagaaatatcacaagatggaggaagggaatagaattctgaaccttctgtgatgtgagcagccatattggtggaatacaggccttacttagagtgggatattcattgcttggcaataaaggttaattgaactttgggtgagaggctaaactggaacctgtgtcattcattatttttatgggacaaatttattctgtgtttttgccttcaagtgaaccttttgtacaagtattaagaactgccttcagttcccatttccaacctaaagtggttgattggtttgccttccacagaatatttttattttcgcctttttttttttttttttttggtctcgctttgttgctcagctggagtgcagtggcacaatctcagctgactacagcctcaaacttctgggctcaagcaatcctcctgcttcagcctcccaagtagctgggaccacaggtgcgcctcacaatgcccagctaattttttagtttttgtagagatggggtcttgccatgttgccctggctggtcttgaattcctggggtcaagcaattcttctgcctcagcctcccaaagtgctgggattacaggcatgagccactgtgtccagccttatttttgctttctttgatttctgagttactcagaaactatttcagggcagtttaagaaggctgtactttttagtgtaggtatatggaacatctttttttgttttgtactatttcttttggacatatgtttgtgagctaattaaacttttctgtttcacttggtcactgaggttcataggtttttctcttaaaagacagaatgggctttggtttgggtcactgccacttgtttgaatatttaggtagtctccacagaaagtcttttatgtggaaccaaaaaattaccgtcttttatatacagtagctttcagaatgctttcacatcatttgacttttttagtaacgggcttgtgaagcaagcagagcaggtggtagagacctgctttttaggtggagaaactaaggttcagaaagagttcatgacttggcctaaattcggagctgaaaccaggtgtttctgatgctggttctgcttctcttttgccatactgcttttcatgtcatgttttctggcattttggtaatgacgttatgcttgaacacttgctgaatattaacctcttttggtttgggatattagcatttagatatttacaaattaacatatttggatttttttctttttaaatcatccagttcttcagtttccctgctgtagttgctccattcaaatgttccgtcctcccactgagccaaaaccaggagttcatgccatttgtcaaggaattatgtaagcaaattcaattgggtaaactccatgggaacaccatcaaggagactgaattttaggaaatgtatcatttatttcaataaaaatatagactgaataaagaatataaatgattttataaagagtacatgattttagcctgtactcttatttctaagcgagaggatatgcttgctcagatgttttattctggcatttgagtgaggcaaggtaggacccaagagtcagatttaaaaattatttacttctcatactgaccttggtgccaagttcatcgagggaacctgagtggagtgtagcaaccataatggatctacagccacagaatccacagccctgaaaggaatcctggtggtcatctggcacatccacttatttcagagctgggaaatggggagagtccattgacctgcttagagccataaaaatagaggtggtggagtcaggactcaccttctggccttggctcttggtcccatatttgttccccctatagctgtatcagatggaggtatgagtgaagatttggattcccgcaagggatttattaaactttagggatatttctttctcttgcaactcaacttgttgctttcttgtcttggtcccatttataagtctcctgagcttgtaagacagtagttagataacactgggcttaactccattgttttatttttaatttactttgtttattttggatagcggaagccctgaccaggcatggagtatctcacaaagtagacgattcctctgggtcaatcggaaggcgctatgccaggactgatgagattggcgtggcttttggtgtcaccattgactttgacacagtgaacaagaccccccacactgcaactctgagggaccgtgactcaatgcggcagataagagcagaggtatctggccttctctttggcatttttagccttagaaatgtgtactgcttcttactgatttgtgttggattttgatgtgtttatgctccctttcctttttttttctttttaattttaatgaacggcttgtatcagacagagcccagattctcaagtcccccggtttaattatgaaaatatccattagcacttctctaatattttataaacatttgtgttgctccaggcttattctccagcagtttgcttttatacttgtttgtttattgggcaagagaaatatgatcctaagaatttgttgccatagttttattggtaggctttggagggttagacattttaatgttttatttttacagacgcgtatacatgtgtatgtataagcttttccgtgttcatatattcaaaacagtgaatcatgtttcagtagttttggtcaataggaaggcagtaatggagatggtagaagcacagaaggagaaggatgagtggtaagggaaaggaaagagtagctgctttaattgacatctgcctgcctaatttatcacctttgagcacatacatcaagtgcctgttctgtgcttagcttgatacagaagtaatagggaaaacagaagcaaaagactgcttttttttctgaaggagtttatagtctaatccagaagtcgtgaatttctagcttgactttttagagaccatctggctactctggagctgtgtccccatctgggtgtggttctcaaaagtgtggtccctagaccagcagcatcagtatcccctggaaatgtatgagataagcaaaacctccaccccagacctactgcatcataaactgggggtggagaggcagagggggcaggcagaactttcttagttttagcaagacctccagatgattctgacgtgcactcaagtttgagaaccattgctgtgtggcagccagtgtttggttttggctgaggaacagtagccttggtcagagctctccagtttgccagtcttatgtaattccctcacacgagttacttgactgagtcctgtttgttctaatagttaaatttaatacacatgaagtaacttcaagggacatggagatttagaaaagttaggaaaggctttgtggcagaattgagttgtctgggggaactggtgggcgttttgggctagaagagcatgaacccatgcctggcatgacattgtttggctctgtgtaaggtttcctgagttcaggatgaatcttcttcttaaaaatctgaacaagttggttgatacttggcttctctttccttgtctctagatctctgagctgcccagcatagtccaagacctagccaatggcaacatcacatgggctgatgtggaggccaggtatcctctgtttgaagggcaagagactggtaaaaaagagacaatcgaggaatgaggacaattttgacaacttttgaccacttgcgctaataaaaaaaaaaaaaaactactcttatgtccactttacaaaagaaaacagcattgtgattactcccagggaccgtattttatcttcagtggctgcctgattttacccccacaattaaagttgaaggaatcctgaacaaacttgtgatctatttgcttgtgtttttacattttcagcaaggctgtttctcccacgtttgggtagacatgctcatggcttaatgttaaacacagttaacactttttaaaaaattaacagctttattggggtataatttacataccataaaaatagcctgtcttaagtgtacagttcaatgatgtttagtatatttacagagttgtgcaaccaccaccacaaaccaattttagaacattttcatcactccaaaataagtctcatgctcatttacctcactcccattctaacctcagcccaggcaaccactcctctactttctgtctattgatttaccttttctattctttatcttattctgagaaaatgacgcagtgtgcaggtactgtgacagcagtctccaagcaggtgaaatgacttctggaaaagcctgaggtgaggatggggtggcaggagtggtgctttagggctgctaaccccactgtttgcagattctccaggaggggagggccttgccatatttgccttctatcttaaggcatgcttgcactcagctccactggtagcctggaaatcattaagctcttgatgctaggggaacccatctctctcgtctgatttagcaattcctgaccatcgcagtgtcttgattctagcctagcagtttttggctcaggttttaaggtactttacttcttttatgtttttgtatagaaaactcagaacgctgtgcttatttgtaagggaaaaattccaggttgtgtgaatttgagcagctgtttatttgcagagctatgaccttatctagtgtgcccacttcctcccctgcagtattggatagaggagtggtgatctccagtgtgcccttttgtttctagtatgaagaacaattgaagttgtgatttcttagatgtaaagtaggaatctcccagggatttccctcatttgtatctcatctccagtggtgcctaccgcagtgctgtacatagtaggtcttccataaatagtctttggatgagtctcgaatttttgaacagacttcttttttgaacaaacctctttgggaggaaagccttatactgaagcatatttctcttccgtctctgcttttatgagcattcattattaaattagaaggagccagattttaaataaactgagttttcattttctagggatttctctcacttcgaattccatataatatagcttttaactgggcatatgttctagcagctttacattggcagggggctgccctaactgcatttatttgctgcttttacagcaggtacctccatagtcaaacagtcaccacagcctcagacattggtttaagctcattaatagggaaagatacattaaatacatagtgagagttacctatcatcaggttggtgccaaagtagttgcggtttttgccattaaaagtaatgacaggctgggcgcggtggctcatgcctgtaatcccagcactttgggaggccaaggcgggcggatcatttgaggtcaggagttcgagaccagcctggccaacacagtgaaaccccgtctactaaaaatacaaaaatcggccgggtgtggtggcacgttcctgtactcccagctacatgggaggctgaggcaggagaatcacttgaacccgggaggcggaggtttcagttagctgagattgtgccactgcactccagtctgggcacagagcgagactccatctcaaaaaaataaataaataaagtaatgacaaaaaccataattacttttgcaccagcctaatactttggatcagaaagggattggaaccaagcctcacttcccttttcattggcaaatacatttgtcatgaggtagaggctggatattgaatctgcaagccctcttttgttccttcccctgggtagcaatgcgtgatttctcctggatcacctgctctaaagcaggtctctaaagtgatacctgagtgagggagacgggccggcagcagagctctctggttctgtctgtaccatgtttgcttgattttaagaacaagcagttgaagtgctgttttctaaatgaagagactctttacccacgagtttgcgtatgcatacgcacacacctcttctgttcaagcccaatgtgtatttaaagcatgggtctttctggcttaatgctctttgaggccttttaaattatttatatacctgtacgtaccggactgtgggcttaacaagagtgagataaatagcattgtatcttggagaagttactcctgtttattacttctcccaaaaatgatgggggaaggtcagattcttttttttttttttcttgtgcttagtgccaaattttatttttctttggaagactgacattaaacgtgagaaaaacaaaggataacaaaaattatctttattttcaaaataactttactaaactatactgattacaaataatacagtctaatgaaaacaaagccacttaaaaaagtttaaagaagacatgtatgtgtaattttctcatataattaacactttaaattattttacagagtgtcattttagaaatgggttgatactattttgaattatagaattaaagtatgatcagcatctaatacaaaaacatacaattagatattttctatttttctgcttttaactattatttaagaatttaatctttttagattagccatcagggaaaatatatagaatcacggtattcatttattatgtatatgaggaaattaacacctttataataactctcatgcttttttcctgaaaattttcttttttttttttaattatactttaagttttagggtacatgtgcacattgtgcaggttagttacatacgtatacgtgtgccatgctggtgcactgcacccactaactcgtcatctagcattaggtatatctcccaatgctatacctcccccctccccccaccccacaacagtctccagtgtgatattccccttcctgtgtccatctgttctcattgttcaattcccacctatgagtgagaatatgcggtgtttggttttttgttcttgcaatagtttactgagaatgatgttttccaatttcatccatgtccctacaaaggacatgaactcatcattttttatggctgcatagtattccatggtgtatatgtgccacattttcttaatccagtctatcattgttggacatttgggttggttccaagtctttgctattgtgaataatgccgcaataaacatacatgtgcatgtgtctttatagcagcatgatttatagtcctttgggtatatacccagtaatgggatggctgggtcaaatggtatttccagttctagatccctgaggaatcgccacactgacttccacaatggttgaactagtttacagtcccaccaacagtgtaaaagtgttcctatttctccacatcctctccagcacctgttgtttcctgactttttcatgattgccattctaactggtgtgagatggtatctcattgtggttttgatttgcatttctctgatggccagtgatgatgagcattttttcatgtgttttttggctgcataaatgtcttcttttgagaagtgtctgttcatgtccttcgcccactttttgatggggttgtttgtttttttcttgtaaatttgtttgagttcattgtagattctggatattagccctttgtcagatgagtaggttgcgaaaattttctcccatgttgtaggttgcctgttcactctgatggtagtttcttttgctatgcagaagctctttaatttaattagatcccatttgtcaattttgtcttttgttgccattgcttttggtgttttagacatgaagtccttgcccatgcctatgtcctgaatggtaatgcctaggttttcttctagggtttttatggttttaggtctaacgtttaagtctttaatccatcttgaattgatttttgtataaggtgtaaggaagggatccagtttcagctttctacatatggctagccagttttcccagcaccatttattaaatagggaatcctttccccattgcttgtttttctcaggtttgtcaaagatcagatagttgtagatatgcggcgttatttctgagggctctgttctgttccattgatctatatctctgttttggtaccagtaccatgctgttttggttactgtagccttgtagtatagtttgaagtcaggtagcgtgatgcctccagctttgttcttttggcttaggattgccttggcgatgcgggctcttttttggttccatatgaactttaaagtagttttttccaattctgtgaagaaagtcattggtagcttgatggggatggcattgaatctgtaaattaccttgggcagtatggccattttcacgatattgattcttcctacccatgagcatggaatgttcttccatttgtttgtatcctcttttatttccttgagcagtggtttgtagttctccttgaagaggtccttcacatcccttgtaagttggattcctaggtattttattctctttgaagcaattgtgaatgggagttcactcatgatttggctctctgtttgtctgttgtttggtgtataagaatgcttgtgatttttatacattgattttgtatcctgagactttgctgaagttgcttatcagcttaaggagattttgggctgagacaacggggttttctagatatacaatcatgtcgtctgcaaacagggacaatttgacttcctcttttcctaattgaataccctgtatttccttctcctgcctaattgccctggccagaacttccaacactatgttgaataggagtggtgagagagggcatccctgtcttgtgccagttttcaaagggaatgcttccagtttttgcccattcagtatgatattggctgtgggtttgtcatagatagctcttattattttgaaatacgtcctatcaatacctaatttattgagagtttttagcatgaagggttgttgaattttgtcaaaggctttttctgcatctattgagataatcatgtggtttttgtctttggctctgtttatatgctggattacatttattgatttgcgtatattgaaccagccttgcatcccagggatgaagcccacttgatcatggtggataagctttttgatgtgctgctggattcggtctgccagtattttattgaggatttttgcatcaatgttcatcaaggatattggtctaaaatcctctttttttgttgtgtctctgcctggctttggtatcagaatgatgttggcctcataaaatgagttagggacgattccctctttttctattgattggaatagtttcagaaggaatggtaccagttcctccttgtacctctggtagaattcagctgtgaatccatctggtcctggactctttttggttggtaagctattgattattgccacaatttcagatcctgttattggtctattcagagattcaacttcttcctggtttagtcgtgggagagtgtatgtgtcgaggaatttatccatttcttctagattttctagtttatttgcgtagaggtgtttgtactattctctgatcgtagtttgtatttctgtgggatcggtggtgatatcccctttatcattttttattgcgtctattagattcttctctttttttctttattagtcttgctagcggtctatcagttttgttgatcctttcaaaaaaccagctcctggattcattaattttttgaagggttttttgtgtctctatttccttcagttctgctctgatcttagttatttcttgccttctgctagcttttgaatgtgtttgctcttgcttttctagttcttttaattgtgatgttagggtgtcaattttggatctttcctgctttctcttgtggacatttagtgctataaatttccctctacacactgctttgaatgcgtcccagagattctggtatgttgtgtctttgttctcattggtttcaaagaacatctttatttctgccttcatttcgttatgtacccagtagtcattcaggaacaggttgttcagtttccatgcagttgagcggttttgagtgagattcttaatcctgagttctagtttgattgcactgtggtctgagagatagtttgttataatttctgttcttttacatttgctgaggagagctttacttccaagtatgtggtcaattttggaataggtgtggtgtggtgctgaaaaaaatgtatattctgttgatttggggtggagagttctgtagatgtctattaggtctgcttggtgcagagctgagttcaattcctgggtatccttgttgactttctgtctcattgatctgtctaatgttgacagtggggtgttaaagtctcccattattaatgtgtgggagtctaagtctctttgtaggtcactcaggacttgctttatgaatctgggtgctcctgtattgggtgcatatatatttacgatagttagctcttcttgttgaattgatccctttaccattatgtaatggccttctttgtctcttttgatctttgttggtttaaagtctgttttatcagagactaggattgcaacccctgcctttttttgttttccatttgcttggtagatcttcctccatccttttattttgagcctatgtgtgtctctgcacgtgagatgggtttcctgaatacagcacactgatgggtcttgagtctttatccaatttgccagtctgtgtcttttaattggagcatttagtccatttacatttaaagttaatattgttatgtgtgaatttgatcctgtcattatgatgttagctggtgattttgctcattagttgatgcagtttcttcctagtctcgatggtctttacattttggcatgattttgcagcggctggtaccggttgttcctttccatgtttagcgcttccttcaggagctcttttagggcaggcctggtggtgacaaaatctctcagcatttgcttgtctgtaaagtattttatttctccttcgcttatgaagcttagtttggctggatatgaaattctgggttgaaaattcttttctttaagaatgttgaatattggcccccactctcttctggcttgtagggtttctgccgagagatctgctgttagtctgatgggcttccctttgagggtaacccaacctttctctctggctgcccttaacattttttccttcatttcaactttggtgaatctgacaattatgcgtcttggagttgctcttctcgaggagtatctttgtggcgttctctgtatttcctgaatctgaacgttggcctgccttgctagattggggaagttctcctggataatatcctgcagagtgttttccaacttggttccattctccccatcactttcaggtacaccaatcagacatagatttggtcttttcacatagtcccatatttcttggaggctttgctcgtttctttttattcttttttctctaaacttcccttctcgcttcatttcattcatttcatcttccatcgctgataccctttcttccagttgatcgcattggctcctgaggcttctgcattcttcacgtagttctcgagccttggttttcagctccatcagctcctttaagcacttctctgtattggttattctagttatacattcttctaaattgttttcaaagttttcaacttctttgcctttggtttgaatgtcctcccgtagctcagagtaatttgatcatctgaagccttcttctctcagctcgtcaaagtcattctccatccagctttgttcagttgctggtgaggaactgcgttcctttggaggaggagaggcactctgcattttagggtttccagtttttctgttctgttttttccccatctttgtggttttatctacttttggtctttgatgatggtgatgtacagatgggtttttggtgtggatgtcctttctgtttattagttttccttctaacagacaggaccctcagctgcaggtctgttggaataccctgccgtgtgaggtgtcagtgtgcccctgctggggggtgcctcccagttagactgctcgggggtcaggggtcagggacccacttgaggaggcagtctgcccgttctcagatctccagctgcgtgctgggagaaccactgctctcttcaaagctgtcagacagggacatttaagtctgcagaggttactgctgtctttttgtttgtgccctgcccccagaggtggagcctacagaggcaggcaggcctccttgacctgtggtgggctccacccagttcgagcttcccagctgctttgtttacctaatcaagcctgggcaatggcgggcgcccctcccccagcctcgctgccgccttgcagtttgatctcagactgctgtgctagcaatcagcgagattccgtgggcgtaggaccctccgagccaggtgcgggatatagtctcctggtgcgccgttttttaagcccgtcggaaaagcgcagtattcgggtgggagtgacccgattttccaggtgccgtccgtcacccctttctttgactcggaaagggaactccctgaccccttgcgcttcccaagtgaggcaatgcctcgccctgcttcggctcgcgcacggtgcgtgcacccactgacctgcgcccactgtctggcgctccctagtgagatgaacccggtacctcagatggaaatgcagaaatcaccgtcttctgcgtcgctcacgctgggagctgtagaccggagctgttcctattcggccatcttggctcctccaggaaggtcagattctaactaatttccatggactgttatgtaagaacacaggaattagatttttaatacttaggttggaattcaggcattcagtcaaatgcaatgtggagttacttcagagaggctatctgcctggcttctgcaggagtccaccaccttaatattgcccaacagctcataatagcaaaatggtggatatagatggtgttccagaaaaggaattcatcaccaagtctaaagaacatggaaataatcttactgttttcatgagctggtactaaagatgtcagacgtctcaagttctttgtgataagaacttgcaaaatcgtttttttcattagaagtcacatgaagtagattcattctagacctttatttactactcccttaaccagtgtaattgcagggtaatggcagcaactgtcttagtcagtggagtctattccttgagagggctggatgccctagagataaatccaaattatctctggttatagttgccctgaaatgaaccttctttcccaaaggaaaactattatctgtatctcttgggctgggctaggatggagaggctttgagagcattgcttgcaccggcatctttgctgatagtctgacaatgtttaaggcaggtgtttgtggcatttggccaacaccaaagtgaaatttagttgaagattcagtaagtaagtggatgactaattttgctgtgcctcaatgttcgcctgttgttgcctgttcaataattcttggttattgagctgcctctaagcagtaatttagttaaggctgtgtggatatctggaggactgtctcctctagaaattgggatgtgatttgggagtatcaccaggggttgcctgagaggcgcagcctgcagcttcgccctcttggctaagagccccttcacttttgctggcaacatgcccccctcttgctggatgggctatcttcctttcgtgttgaaggacacacctttgaaaatttgttgcctcagtaaaagatgttggggcagtggttctcaaccctggctgcacattaaagtaacttgagctttaaaaaaaaactcatgtctgggctcctccttaaaccaatttaatgagttgagggtggagcctgggcatcagtatattaagtctcttaggagaagcaccactaccactgttgcaccttgtgaactttctagctgtgtgaaaggctggacccattgctctctcaaaaggggtttcctctgagaatatgaatgtgtaggacattgtatccagtgagacagttagagaagtagatgtgagagtggggaagtgagcagtaggatttctgttttcccggggaattttagggaaccttattcttgctggatgagggtagtggtgccaaagagcagaggggtgctgtgagctctgggccagaaataaagtaagctggcttcttgtcctgactcttctagtgtctgaacttaatgatagtttcaggaacttgaggctaggaagagagagcccttctctctttgggagccaaagctctctgcactcctttttttaatgtgcaagacttagtgcacaagtgagcctgcatagaatttgccagcctatgcctgcgtttgctgggtcttaaaactcaatcaccaataattagcacaaaagcagttatgctaacgaaaacaatttaggcaaattgaaagctttttgggctcatcaaaactcactgttctgcatctaagtgtgaactaattgatagagagattaagtacagtgaaattgtgggaaagaaaaaacccactggcaagctttagaaagtcttttgttttttaaaaaaaacttgagcccagattttccatttttttgtccagcctgtcaactccacctgcactctatatcagaattgggcctacttgtcaccaccttcgtggccaccagcttggggcaagctgccatcatcacccatctggtttactgcaaaagacttgcctgaactccctgttcgtgcccttgccccttcatcagcagttttccacctggcaccagactgcattggtcctcaaaactcagtggccttccttacctttcctttcctttttcctttcccctttcctttccttctctttctttctttttctttctttcagatggagtcttgctctatcgcccaggctggagtgcaatggcgccatctcagctcactgcaacctccgtctcccaggttcaagcgattctcctgcctcaacctcccgagtagctgggattacaggtgcctgccactgtgcctggctaatttttgtgtttttagtagagacggggtttcaccatgttggccaggctggtcttgaactcctgacctcaggtgatccaccacctcggcctctcaaagtgctgtgattacaggtatgagccacctcgctggtccagcttttcttgtcctgcaagaatagcgtagatctacgccacccccgtgccaaccacccccatgctggcccttttccagtggcccagcatgcccaggacaggaccttggtactcagttatattctgtctgcctgcagtgcttcctccaaagatagggttcccacaaccactccctcatctcgggatgtcattcagcagttgcctcagtgaggccttcctcagctgcttcatctgaagtttcaatgtgcgccacaacccccacattcagacacatccctttcatatcgccttccttgttttctttttcctcttgagtactaaacactttaaacgtattttacttttttattttgtttaatttttggtctccacattagaatgtaagttccatgaggacaaggatttgggtctgttttgttcttggctgtatcctcattgcctagggaagtgcctagcacttagtaagtcctcagtaaatatatgaatgacttaatgaacaaatgaatctttccctgcagggcagctctacattctgtattttggtataaaaattggcttagttagaaatggctactcacacacaactcaccccttggctcaagccccacgtctgtactctgcaaaaggcctgcagccactgaatggttgggcacgaaggcaggtttccaaacttaatagagtggtgccctttttgaaggaaacaagacatcaaaagcctctgtagtacactcggagtcctcatgttgagaaactttagctaatgttgtatatttaccctaagaccatcttccatttgacaccaaaaaaagaggtaactggtaagcatttttaaagattatcactaaaataaaagtaaatttaaaaatctttataacactggtggactctgagaagaggttccatgcagagaaactataagacttcaaggtcttttagggacaagagttcctgggctggtcaaggcaccctgaaaggaacagtatcactgggtaactggtattggcatttcggggttggaccagatgtggccctgccttcgagccctttacgacctgacggtgaggcctaacctcacatacagtgagggtggccatggaggaggcttggccctgggcctagaaaggtgacgtcgccccgtgcagtggtgaggtgggtcctgtgggacacacggcgagcgcagggcctcgtgagcactcctgcagcctgttcacatgtgggtccgtgcctcccaagatgtgtttcagggcctggggtggggcatctaaaacacagccaggcctaagcaccaccaacttagggaattcttgctagctaaattagagtgttttagttttatcttgatgttaggggtttataaacttgggtctgtagttccttcaaggatttctgtggaggtgtcattgctctatttatacccaactgtgtttttctaggggaatggatctatcccatctccaaggggtcagctgcccaaatgaagtccaggtctgattgcaggtcatgggggcctctttccagattgagctcctttatggggaaccccaccagcattggcacctcatttcttcagatgcaaagatcttcacattcaagtctgcaatgaagggggaggggggtggcccagaatctttcaagctgaaggatgagatggatctggagacaccaggctgaggtgttaatttgcttaggaattgggggcctccatagagcacacgtggaaagtccctgaatggccagagggagtacggattcccttgtaattgcaggtacagcatttgggccgagcaggaagcacagggaaaacaggtggctgcatgatcgctcatgggccccccactggccttccccagagaacaccagactggaactggggttgaaggaagaaatgacgagtcttagaatttctccaccttcctgggtggaagggcctctgtggggattcgtgatgctggattgtttatcatggttgggccttagagagctagagggggccttacttggcactctacagagctaattaagaagcacaattaattacttcatcatattcacagcagaagctgaggacagtttttttctggaaccggaatcataaactacttgcccctgctcaatcacttgtccaccaagcagacactgagatggaactcaggacatcacctcagaaaatcctttctactcaggttctccttccaaagtgcggtagctaacgttcagaatttcctatggatctggctttcatcattcatttatccaagtagcgtctgtggcccctgctgtgtatgcagacaaatatggggtttaagtagggtgatcatataattcattgttcagaccaggattcgtgagagtgaaaggtatgctattaattacatgaggtcacaggaatcatcctggactaacgggggcaaaccatgtctcatcccagcttagagaactgctgaagagcagcctgcgtccaatgccagtgggaagtcgagagccattgaggcctggggccccttggggtgaggttaatctggagacagctgcaggagagtctgcagggtgtgatagaggccctccggctcccatctgctgtcactcatgtgaagtagagaagaggtgatgccctctgtctgggactggcctctgggctctggtaagggtagggtatggagccacagacagatttctcccgctgtgcaaagccaatagatctctgggacttctttgtgcctttggtcattcttgtgggttaaccagctctgggtgggacaaataggaaaggctggtttatttaatgaatgtttctagggtttctcctgagtgcagaactcttgctgtgggcctaagaaacagcacatgccccctggaatgaccagcccagcagtggagtctgtggagactgctgaaggagcccctagaggggacatttctgactaatgcataggttttgccgggtgatggttctgtgacgagggaggcctgctgcagcgctgtatgggagggccccgaggcctaaacaaacaaatacctaagaggaaaatctggcagaaactcagtcaacacagggcagtgatgccctctgcccattcctcctgctaattaacatgtctaagtggcacagccccctcaggaaaattaacggcaccttcgaggcagagcctggaagccatcctgggcatattgatgagtagattcacatgttttctttctttttttttttttgagactgaacctcaccctgtcacctaggctggagtgcagtggtgtgatctcagctcactgcaacctctgcttcccgggttcaagcgattctcttgccttagcctcccaaatacctgagattatagacacgtgccaccatacctggctaatttttgtatttttagtagatatggggtggtttcaccatgttgaccaggctggtctcgaactcctgacctcaggtgatctgcccaccatggcctcccaaagtgctgggattacaggcatgagccaccactcctggcgtcgctgttgctttctacagcacgtgtgtgtgttggaaagaagagacaagggatgtgtctttttttgctggcccacaccccagctgtcagaatcacccgggggcctgtgaagcgtgtggattcctagaccccaccaagtatgacttctgaagcctgctgtgcaacatgccacccggttgcttccaggtgtgctctcagaacagggggccgggctccctggctgaaggggtccccctgcttcaagcccctcctatgctctcggccaccccagccacttgttccacctgaggcacagctgtttaccaccaaaccctccccgaccctggctgaaatgtcactctagggaagaactcccattgggcctcccagccctaggcctgcctccatgacccatgacgtgtgcaggggatactttgttctcctgagcgtgccattttctagtcccttcacctgtccctcataggacagctcccttcccgtccagctgcatcagcacacgtcccccacctgcccagggcttctgaagatgctggggaaagcacaagcggcacagttgggcctctttccctattctgtttttggggcatctggagatccgggcctgcatgggggtgaaggggaaagaagtggggagggcagctgaggtccttgtgcctagaagccagctggcttggggccactgtgggcatggactaggagatggacagggcagggggctgggggcaggcgcaggctgcaggagccgatgtgtcttttgcctgccttttccttgtgctgttctcaaccagattatgagtttcttgaaacaggaaacttgtctttctgttacttccatatctggcacaccctggtgttctgtgaatgggaaatgatggaggaaggtgcgtgcgcctccctctctgggtctgtgcgtgtgttcctacaagtctttctgtgtccctgcccttgtgtcatttccatctgggcctccctctctgtggccgcgggaatgtcggcctccatctctagggaagtctatatgctgaagggactttctgcgagtgccatccctcacaggtcttgaggcttcaggccctcaggtagcacctccaccatgggcactcccagcaggggactgggagagaaatgccgtccctgccattcacctcctgccccacagatgttccaccactcgccactcctgccgccgtgtgtcatttaccagcttgtaccccagcaggtactttctagccgcactttgatgatgacccagggacttggagctgtgctggggtcagggctctgcctgttactctctcttggagtggggccaagaggctggtgtgaggacctgtggctggttcaggtcttccccagttgtgtaaatcagggtgggtgaaagggttaaacagggaccctaagggcctccaggatctgggtgctggaacttgcctgctacggagaaggagagtctgctaatgaggccactttccaggaaggccagctccacgaggtgctgccagcgccgaagcagatgctaatgaggactggcttggcttaaggaacaggtgcctaacgagcttaacaagtagggacccagagagatggcctaatggctctggtggcattttaaggatagagctcagtgggagccacaaccaggagacggagtaatgagggattcagggctggggttggatcaaggaggagcctcctctgaactggagagagagcatatcgaagtgcctgctgaacaaaggttagcaactttgatgctcttcctggtgttggccttggcaggcctggcctcccagcagggatcacaggcccttggtccctccagggagcaaaggacagttggcgtaatgagccgggggctgcattaagaagcagtgatgaatgcctgggacttggtgccaggctctgcagcgtctgctccgataagcacttgttcacagcctcatctggccacagaaatctccaagtggcctcttgggggccaaaccatttgcggctccttgttctacaagagccctgatgatgctaatggatgcggccatcatgctgccactgggtatgcagtaagactttctaagataccctgagttctgagttctgtcacttgagaaaataaaatcagggtgccccaacctccctgccctcttgacaagagaagcagggctcacacttaacctgcagtgcattcccacacagctggtggtgaaaaatggaatgagctgatgacatgggcgcccaaagcctactgcaagtcagataacgttcagttcatctttttcagccaaattgaaaggacacttaattaaacagccagctgataggtcatttttggtgacagatcactatgcagttttgactgtacatctcagcaagagtatagagaattgactatctggagtgccagatcatctactgaattgaaaaggcttctcagcacaccccactataaacaataaaacattaaaaaagaaaagaattgatgctgagtcctgatttattctagcaataaatattcacctgtagattcatgagccattaacttcctatccatttcattaagctgtgttttcaatacattttcctttttaggtttaactagttacttataaaaactttaggtatctatgttgttttaatcagtggcttactgtattttgtatcaaaaaataattgtaataattcaacccagaagattattttaaaatcccttgaaactttggtcatagaaaatgaaatattttaattttcattcatacatatattgtgtggcagagaagtatgacaaagtgagcaataaaacactttcagccataaaagtaatgcattagtataaaattctatagggcaatggaatgaagctacacattaaagaggaaagaaacaatgtaacatttcccacaattaaagcggagctggccagcctgagcaacatgaccagaccctgtctctacaaaaaaatacaaaaattagcccagcatggtggtgcgtgcctgtagtcccagctattcgggaggctgggttgggaagatcacctgagcctgggaagtggaggttgcagtgaactgagatcttgccactgcaccctagcctggatgacagagtgagaccctgtctcaaaaaaaaaaaaaaaaaaaagaagaagaaggagagctgggtcaggtgtttttaaaatagatgagggtgggtgttaaatcaccatggtgatcagaattcatttgatgtattttaaattgttgcagcagttttatttaaaaatgtaaatatttacaaaatggcagaaatcacacctttgaaggatttaaaacttaagtaaaaaatactacatgtcaacttaaaaatgtgcaagacgggatacatgatttttcaaaacttatttttgtagggggtacctagagcattggtttcttttggaagaaatggcctgatgcttctctctccctgactcctgcggctccgctgcagggacacagggacggaagccaagcctggaagctgccctggtggtcaactgaggggccatgtctaccctgcccaccagattccagagccttggcctttgggacaggccctggcttgctggatgagctgcacacctcctccaggctgaatcaagctgcccttggttgggggctggggccaggtattagcctggttggagtgataagggacagacccgcctgcaggtgctttgaccataaagactccaaacctaccagaggtcagagagagagagaactggcccgaggccagggcccgagcccactaaggaagatggatgtggccccctcagacccagccacgatccttggcccacaccactcttcgggtgcctgggtgacttgacctgaggggaggccacttccaagaggcatggtttatttcacagagagcagagatgtttctgaaggggagactggagggcaaagggcaatggggtatgagtttcaatcactgaagacatggttggtttctgctattcccatcccacgcctccctcctccatgcctctgctcctcattttgccccgcacgatgcaactggttgactaaggatgtggcttccctgatggcgtcttccttgattgcctaatctgtggactaggcagagaaggggtctcccaagagaggaagccaggcctggaagcctgcatccttcatggagcccccaaggcgggaggatggctggggaggggacacaggaacaagggtggggtacaagtgagcctctctaggtgacagcccctgggataaggcagccaaactgatcctttgctggcgtaccccacccaactgcaggggcaccactgagtgtggaggccaagggccagtgcagggccacaccattgcctggctgctggctccatgagtagggcaggggagccctgtgtctgctactataaatagctgtgtgtgttggacaggtccttctctgctctgggcccagtaaggccctggccagagaggctgggatgggcaaatgcctgcagacatctgactggctcttctcagggggtcctgtgaattccctctgcttcctcttgcgctgagcctggtggcccccactcatccctgtcccttgcagtcccccttggctgccgcaccccctctttcctgccaggctggagagctggtctctcccctcccatctcctgccccacgagagcctgcccagcacagagaacccagaggaagaaggtggaggaggacaggggagctgtgcaggtgggcgaccgaggggtcacacagcggccgtctgcttgatgctgtggaagctgatccgtgtgggtgatgtagggatggacatggcccgggccatggggactcgaagggagtgatggtcctgccagcggtgccacctcttcctcacggctgagcgcacctgtggggaaggcagaggctcagctggctcccagggaccaaccctgggcttctgggaccatcccctcctctgctttctgctctcatgggtcgactgccaccctcatgacaaggaactgtctgcttccaaaacaggtccttccctgatgctgttgcctctctccaggggcctcttccttatccttttcctggagaagcttgactccacacctcctttactccacactgtcctcccagatcatccagtttcctctggacacactgccttcccttccctgactcactctgccacctcaaaattagcatcttgggaccagagagcgcagcttggagacttggccccctcagccttcttgggcccctgctccttgcagggcgttggtggtgtgcgcccagctcacacacctggtgcgcctcctcctccctcctgaagaccgtcccctctgcacccctccaccttctctacctcctgctagactcccctgcctgactaaccatggcatttactgcctgaaagggaaagctctctgtcttggtcatttctaaagttggctctacccggtgccatttaagcttcatttgtttggtaattgaatttttttggaaattggatggtgtctctcacatcctagcttgcacatggttcgaacagaataaatgctccataaacatcccttgtttgtttgccttactggccccctctcttcttctcatccagcccacaggacccgtctctgctgatggactttgcaagtggaatgtgctatcatccacagagacacaggcctgcatagacacctcgccagtgccctgtgcagagacaggcaagtgtattcctctggagtgttcggaagctcccaggccctaggggctgtgtctgctctttgctccatgtcctcatccaccccagcccaggtacgagtgcgcttcttccctgcgtcagctgcactggggctttgggcctcatgattggcttgcacatgccaagcttcacggccgcctgactccccagagcctgctcttggtgtgtgggcttttctgtggcaggtagcgggggaatgtgctggtctctcttctgctccctgagtccatacagacctgattgcttggcacacatctctttctggaagcttccttctgtcaccacctctgctctggcttctctcttccatgaggccctgcggcctgggcttccttgctcacccagctctgagtgcacatgtggggtgctggcatgttatttcggggctgcatagttgaccttctaaactggctccagcccctgtgagaaggattcctgttcccctaaggccgggtggtatctcaaggcttcctctccctggcactccagcaaggccgggcagcaccaatggagctgccctggagtggggtctgaggacctggatatcccaggccaccccgagggcccagcttcatacctctccattgaagaagcagtagaagacagacacgaagaaaccctggaaaggagggaaaggagggagtggtcagtgacctacctgcggagctgttctgcctggtggggtggcactggggacaagatggtgggggggggacaatttgacccaggaacccctggagtcagagctgggtggggtcctagcctcagggtgcagatattccacggtccactctgagtgagcagtggtcacaggcctggagccaggcagactccggtctcctcaatattgtgtgacctgtcccagggcatttggttgggctgcctgcatcctcagaacaggtgctgggacagtaggtgcgggctggtaggatgaagacccaggctgggatggggataactggccaggctcaggctgagcatgtacgggcttctaactctgtggatgtaactgagccatgggtgtgccagtcccacgggacccccttagtgagggcatggctgccagagcagcctcaggaaagctcactgtggggcccccatctggtcacaggccccacctggaacgactgcaggaaggagttgaaatagatgaacatgatctgtgacaggtcgtcctccccgggattgacgaagaagagcatgtaggtgatgcccaggaggggcaggagcaccagggtggccttcactgccttcctgggggcgagaggtggacacaggtctgagcccatgcggcaggcagggcctcacccagtgggcggcgggagacagtggtggtgtttcttccgggagcttgagcgagctccctgggtgaggcctggggcagagggctctgccaggaagcagggggacggcccgatgacctcctcctgtccccattgtggggtcaagggaccccctcacatacctgtactggattgtctcggatgtggtggacgcgcgtaactttgtcattaggatcctgacgatgttgaacagaaatacgaaattgatctggagggagggcgggcatgggaaagagggaaaaggaaggagcacgtgtttgagatgagccgagaggcagcccccttccccgcagacccctggaaaccgatgtcccacgcacacacctatcctacctgtccccctagcacctgccagcatcccaaggcctgtgctcctccctcgccaggatggggagacagccccattttccagggcctgtgtctccagcccaggactgaggaggaaaggtggcagcctctgtgggtcgtgaccgagagcacggggcatgccctctgaggctgagaaagcccccaaccctctccccagtatagggaccctatgggagcccccttcccctcactgccacggggtccctacttgttgactgcggggctctctgagtcccttgcactgtcactggctctaggtcggcctgaggtccttctgactgaggacagcactgccatggtggggcggacaaggccagatggagggattaagaactcagttgccgaatgagtgattaatctgccagcatcccacccctgtgcccaggaactccagagccttcgtaggcaccctagacagggaagatggatgggctgtggggctggctctgaggccccaggaagggcctcatttatcttcattctgagttttccctcagcaccagagcctccccacccagcacctggccctggaactggcctgtgtggctccccagctgctccctgctgggtgtgggtccccatgggcctgcgagtgtctgttcatctgtattggctgtgactatgactgtgttgtcccctgggagctgcagtgtgggtctgtgggtctatcctttaagcacttgtgcaagtgtgtttgcctcacagagcgtgtgcatgtgtgagcatggatctggggcccgggcacatctgcgtttctcttcacctgcctccgagcataggcaggcaggcaggcaagggagtgtgtgtcggcctgacacagtggggctgtttcctgacaaagtgctcgtgggccagagggagacacatgttagcccaggggtgtctgctggctcgtgtgcacacacccactcacacacacacacacacacacacacacctctgacactctgtcaagaaaatccattgcttcttaagcttgggctgggcccttctaaccctcccaagttctgaatcctggctgggagaggagggacacaggatacagacagatatcctgagactgtcaacctgtagcctctggatgctccccacaagctttcgggtagccctaggggcagggagagctcacaccccacctcagccactgtctactgctctcttaccacatagtggtatggcctgggggtcccagggagggctggggatggaaagccttcagcggggctgccatgacctgatacccccagctttctcctagggctcacctaatttccagctcctgggtctctggcatattcccctggatcatgggacacaagtcaccttaacatataagtgaatcctaattttctcatacaagtaatacaaagtatttgaccttttctgattcttccggacttccctgagagtagaaactgttggaatcaaaatatattctcatttctgccacattttcttgaattcaatattaatcttccaacatccatcaacccactaatcaattcaattatccacccactttattcatctatccatctatccacttacctaccaaccagttcattcatttacccacctacttttatccatccgtccatccatccatccatccagccattcatccattcatccttccttccttccatccatccatccatctacccaacaaccaattcattcaattatccacctactgttttatctatccatccacgtacccatccatctacccatccatctacctacccaataaccaatccattcagttatccacctactcttttatctgcccatccactggcccatccgtctatccattcatctacctagcaaccaaggccttgtctccatccttacacttggcagacatttagttatgtggccccactcatctcagcttgggtctatgtaacctgaaaatccttctttcctttgagcctgtttcccagcctcccccttcacaccaccacaggtaccttcctctctctccagggagccttctggtcaccctgcccacactgagctctccggctttccattcttggactctacctccctgctaaaaacacactccagttctttagtaagaactgtctattgtaccctgccctcgttcagcctgtttctggttttatttaattgttcattcattcaatgaatcaatggaccatgtgtcaggctctgagccaggcatcagcgatggcgaagtggacaggcagtcacagcccctgcttgcagagggcttgtggcctagctgggggcctggaggggttgggggtgggggagatgacatctttcctaaggtgtcaaaaagacctggagaaatggcagatgggctaagaactgaagatgaggcccccctcccaaatgaactgaagcaccaagtcctagtctcatggctcaaattttgactgttccaatttgcagttgtgtggccttgggtaagttgcttaacctcatgagctcctgcttccttgtctgcccccgaggggcctaaccacagagcttgccttagaagatcagcatgggctgaaatagtcacagagaccactaagacctgtgtctggcctagtgactgccaatcctttcccatgacaccaacaatgacaacaccagcaagaagtcaggcttcctgcaaattcaaccacctgattcacttctcagaaccagaaataagtgagtgtctcttagcagcagaaatgcagctgtgagctgctggggagtgtagggatggcaggaacaccaaacacgtgtccaacctcgaggacaacaggcagatggtggggacaaagcaggagacctgcctttgagcctctgctctgctagctattagtggtgaccttgggcaagccacttcatctctctcagcttcttcctctgtaaaatggagagcataaccctacttcttttaggacttgagcatgcaagggttggaaataatgtagatagagcttctggaagggctcagcttggaatgtggaagcccctgttggtgcaaagagctgggcccaaaggaaagaaggaaagggctcgtgagcacagacgcaggggtggagccagagaatgggtctggaagaggaagcatggagctgggtcttgacactgagctcttgcgttcctcgcctccctttctcttggcatttcctcaccacccttccaacatctttacagttggggcttactctttgccaccattggtcccccatccaggccagccttccttggctcagttccaggctcatcaaaagccttattcctccaggatggcccttggcagctggttgggagggaaaggatctcatggggtttccatacacactgaggggtgagtgactcactgcagctgggagtccaaggacaatcctactagctgctgacaaaacctggcttctgcctctgaagcgaaccaagccctgacggtggaatttccagcagtgggtgaaaaaccttcctagtcttcatcagttcacatatatcaaggacactccaaagatggaggtcaaatgaaacccgaagtcacagaaaaaggagagtaagaaaataaaagagataaataataattgtctccaaggtagacaaaagaaagccccaccaggcaccttctgtgtgcaggaggagatggcactctcgctgagtctcccagaaggaactgtggccctttaaggaagctggtacatacaggagcctgaaattactgagcctgaaataagtcttacgtaaatgccaatttcttacggggcttttttgtatgtctttctttctttatctctctctcttttttttaaaggtatgatatataatgggttccttttgcagaatgcagcctctacttgaactctctcttaattaaagctcattgtggattaaagatgtgtggcaattataccttagatgcaaatacatttggcaaagggcagggagctggacaaggaacaattcctcattatgctgcatcccggtattcaccgcttcaggctgggggtggtgggctggacctggagagggtcactgggggctgaggggaacgtaggtctggaatgaacagaagcccgcacactcttctcttgtcaccagctgcctgctcacctggctttctcagcattgtacagtgtcagaccgggagggcacaggaagtctacccatcagatcctttctcctcccagagaaagagccctgaggtcagcagagtggtgcagggctgcgccagggcatcgagcatgaggaagggaaggccgggtggtgctggggcacagggtggcatggacagggtacgggggtggcatatagagtgtgtgcgcagggctgcccatgccacatctttcccagcgtctctgcctgggtgggccctcttctgtcctcttggcacccagccccatcccagccaccgctgagggcttaccaggagcacgagaatgatggggccttggtagatgtagtccaccaggtcgccaggctccttgccaaaccagcacctgtgaagatggggtggctgtagggggcctcctgagctggaactgggggacccccacagacttgggcccagggtcctccagctttacccttcctgagacccaatctccaggactgccccttcccagaaagccttggtggaaataccagctccactgaccacccttacccaccaggctgtcttttgctctacatggtgggtctgatctccccagcccgactgaggacaggccatgggtctctttctcctcctcttttacctgccccattgcagactgctaggcataggactgggcatgcaggaggcacaggaataaagggagagctgggctcccccttgctggcccagggccaattgccttaggccacctgttcccatattgcttgaaacccgctgttccgtgtgccaggcactcactcggccacacaaagcagcagatgtggaagtggagccttcctacctccagcctgggattttgcgtctttgagccaatgcttgtgcacccagtgaggggagctgctgcctggctggcctcactggctgccagaggcataattcattctccggggatgctggtcaggggaaatgctttagggtctgggtcggccagcaactactggaccacagggaggggccatcaactttggggaactcattcctctgaaatcttggaggtcatccagtgcagacctgcctcagataggattctccctgtctcccagggtttctggcctctgcttggagccctcctttgacaggaagctcaccacctaccaaggcagccctcttcttgggcagcttttactcttacaagctcttcctaatgttgagctcctggaactctactccattcttgcccccactctgagaacagatcccctctgctctctccaggctctgagacagaccccttggagatttgcatacaggctaatgttccctggtccccgctgctctcagctggtgacacctgactttctggctgctccttggctgacccatggccagagttgctgtcatttgggctgtggctcagcatattacagcctctggcatagggagaacctcaggatgggacactgcacccaggcagagactgagacttcagaaaaaaaaacaagctctgttaaatgctcatggactctttaaatgctcatggacagctctggatgtcatgtgcggccttggccccttccacataccccgggccagagctgccacatccaagtctgaggaggccttacaaagaccaaaggggtcatgcgttgggtcggggggcacttcaaggaaccacaattcctaacttaattcagcaaagttccttgagccctaccatgtgagtacctctgagtgcaggactatttttttcaatttaaggacaacaggaacgtggatctgtctaggtgtggctacaattcctgctccacggcttggccagagcccaaggctgacctgtcctaacacccccattcccttccccatgaccccccatggctggcccatccacttactgttcattctcatagtagagcttgccgatggcccaggcgacgatgatggggaaggggatgcctgaaagaaggaaagacttgggctgcaggggacagatggacagggactttcttgtaggacataccgtggggtaccacaacagggctaggatcatgtttttactcttccaacagcaggccacccacaaccccaggggtgccctgtccctcaacacctggcccatgcccctgcccctctctccaagcagggctgcgtgattttgtgatagagaagtagagccagccagtttctgagccagagacaaaggcctttggacaggtccttcctggcagggggagaagagctatttgaggaatatcctttggagagatcctttgcttgttcctcaccagcatggagggaagtagctgcatccaccggactgcgctgggggtggagggcagggccaggctctggtccttggacccaagacgaagggaaatggcctggtgagaagtcctccccccaactaggccctgctgcccctgggaccctcacaccatccgatgaagaggaagaggcacttgcgcaggcgctcagtggagtaggtcatgacaatggccgtgtgcaggtagcagccttccacaaacatccagaagaagttggtcaccacgaagtagttgaagatggtggtgatgcagcggcaccagacctgtgtgcagggcagagaggctgtcaggaggcagcttggggcccaggtaggacatacccatccccaggcagggcaacaagacacagggctccccaaagggggttcgtggacatgccatcaaataccagcgaacctcactctgaaaagcttcatccttctccagtgctctttcacactttcagattaagttaaggtgccattctccactggggccaacgtgttttttttaacttctctctaactctttctaatttttcattctagtaaagagagcaagagtctggctctgagctttctgtaggcagaggctggaattcaaccatcttgttgtgttttcattttagtttttttgagtcattttcaatccatagcaagtcagacctgcttccttttggggatgggatatggaatttcatttagaaaaaaatgaaaaaataaaagtgagtaaagtgagtcaagggtgtatgaagtggggctgcggccagggaggggattctccaaagactctgggtttgggaacttctggacttggcacaattattactagctctggagggagacttgcaaagtacacggcccccggcaagtcactgcacctctctgaacctcaaaaagtaaccctgccttccagggtggttgaaggagatagaggatggcaaagacaggcatgagggtagctgtgttgtggctgtggttgtgcctgctgtggttccgtgccttcccagcagaggggaatgtgtccctgtccctctgagcaaggccacccttccccaggcaccaaggctaccttcccaaaggaggcagggaggggaagaccctgcccctttagagccacgcagtgggccatggcagggccagggtctagacattgggcttccaggccagagctcctctcaacagaccccacctggtcatcttccccacaggctcatccccagggcaccctgagagccaaggctgggacatggggaatgatggagccagctcaaggtccggggagctgtgcgtcaggggctctgcttctgcacacagcccatcctctctgtctggctctgacagccccagttctcagataaccctcctgtgctgagctgttggctgcttctgggcttccctgcacagtccctgtggctggctgtctccttttttctgagaaagtcctgctgaggtgggaagctaccaagcccctcctcccaaccctacttttcatccagggttgatgatgttctattagcacaagcccacgttggagctagaaggcaccctcaactcgagtgaacctgtttgattctgaggcagtgttctatgtgggaccatgttaaggatcacaccaggctggtgtctgctcaggcacaggccacccaaaggaaatgtactgagaagtctctgtcggtgtgccacagggctctgtgatggcccaagactagtctacagttttacaatagcttggacacagtacacagcaatggacagaaatccagagtggacagttagcatgtgggatagccccttatgtagaggtatcatcactgcatgtgaccttggcgagtcacttaacctctgtgagtctcagtttccatgtctatgtaatggggaaaatgatccctgctggtctcattaggattaagtgagagaaagctcaacagaggttagttctagcttccttttctcaaaggggtctttgagggcacctgaatccacaagatgaggagtggactaggataaatgtgtctagagtcagctttgtgaagctcccagcctggcagcttcctgctcctcccagcccagctctgttgggacaatggctagggtggaggtgagctcaggtctggttttgcacctgagccacagcccagatgacagcattctggccatgggtcagccaaggagcagccagaaagtcagttgtcaccagctgagagtagcagggactggtgaacatcagtctctgtgtgcaaatctccaaggggtctgtctcagagcctggagagagcagaggggatctgttctcagagtgggggcaagaatggggtggagttgcagaagttcaacattaggaagagcttgtaagagtaaaagctgctcaagaagaagagggctgctttagcaggtagtgagcttcctgacaaaggaggggtccaagcagagaccagacagacagatgggtgcccccggagcccagagccccccaggtatagccccgagtctccccgagcaatgacctcattgctctcgtgcacttcatggtcaacgagctgcagcaggaaccacatgacatttcgcaggataaaggtggtgatgaggttccagtgaatcacattccgcagacagcgaatgctcctgtgggaggtgcaggtcaggggtcagccaggttcaggggtcaactgggactgggttccccctgaggccaggtagagactcagcctgggatgagggcagggctgcactaggagccacttcccacccatggtggccacagttgggcctctgagtccagctcccactctgcaccccacatgcctgctggtgattcatgccctggcaccccacccaaaccccactttctccacgggcccttttatctgctgggccccagaatggaggtgagaatgtctgggagaggtgaagggggtgctgtagggggagggatgaggagaaagcaaggcggaagggcagactcaccgcagggccaggaaaagcaggaaggcggccaccagggctgccacagatacgcagtggcccaggtagttgacgacaagggcgatgcggtagtgcaggtcatacttcctctgctggacagacagacatgggcagggcagatggaggcatgggcacgtgggggtggggctgggtattccagccgtggccacctctgtgtcctgaccttgggggcagaagtgctccaggtgtcattgccgtgcctggctcttagggttcgttcctgttggccctgggtggctcttgttgttataaatggctgtggtcaggccttccaacatgcatttatttttatttttttagagatggggtatcactctgttgcccaagctggggtccagtggctattcacaggtgtgatcacagtgcaccgcagccttgatctgcaggcctgaagcaatcctcccacctcagcctctgaagtagctgggactacagacaagtgccactgtgcctggcaccaacatgcatttttgggggcacattttgagaggtatgggtacagattcttttttaaaattctaggctctagaatgcttctcctgagtttagtctcagcccggatcccagctggctgagtgactgagggtgagtcgatttttatttctggacctcagttttgatgtctatacaatggggccaacctgccatcctacctaagaagcaatggcctatgggaggcctggggtggggtgcattgagattagtctgccctggagaccacacgagggggtgcactgtctatagagaatttagaaattctattcaaactgaataaaagtcagttgacttttaattatcaccaagtgttggcaatttgaaacaaagttagtgatgaaatactccttcctgccagggagagccacccctccaccctacccaacccctgtgttgattctccactgctggaggggcagagagagtggaggtgaggaccaagggctggaggcccccctgcccattgagtggcctccctgcagaacccctgtggctcacattttgcagaatcactttctcagggcgggtgaatgtttttccctctcaatttggacttcatctggggcaaagtcccagccccactgaggactatgctgggtaatgaggaggggatggagctgagatgtatcctttcaggtcaggaatgaggcgtagcctcaaggagaggagttcggtgcctcagcagcactgaattgaattccagagcgagagctggagcagggctccagagaggcagagcaggacccagcttctcatggggacagcccttggggggctgcatttgtttccatgtggagtcacagaatcagaatgccagatggggaaactgaggcccagagggagaggaaggtgtgcagtcacacaacccctaagatgttaggagcattgattacacggttattccctttttgtgtcacatgccaccttggctttgtcctctagcagcccaagctctcttgaaggtaggactccatgtcccccttctctactcccctacagtgtcactaagcacagggcaggacactgggggcaggggcaggaggtacagaagggagtgactgggtgacaaaaggactggtctgccccccttgggatcttctctgctcaacctgagtccaaatacctgtgtgaggcctggggtcacagcaggtgagggccactcaccttgtcatccaaaatgggctcacactgtgagtagttgatctttgaggcccacgtcccattctccaagcattctcgataggcattccctacaaaaaatgccaactgccaagagtcaggtcactcccctcctcaagaaccctccctggctccctggtgcccacaggataaggtgtacgcacctcagctctcctagggcagcaaatacaatgtgcatctgaaagtttacatgtaagtcacttatgtgaaaatagcacaaaaggctcatcttacaaaatagctaaaggcatgctaaaacccattttagacacaatctttgactagcattttgtacactttcattttgttcatttgcttcaaaactgaatccaactgtgaggagtgggttgtgcctgaagattcactgctttcagcatgccacataatttacatccttgtctcaattgttttatatttatgaggtccatacttcaccaatatcagcacttccatttttataatagctaccatttatatagcatatgtttcccatgtaccacttcctcttctaactgctatggatatacatgtcaattcaatctccacaaccatcccatgaaggaggcattaatatgaacccatttcaaagaggaggaaactgaggcataaagagattaagctactggccaaggatacaaagatgacaagaggattcaaactcagaagttgtggcttcgggtcttctgttcttaacctttaggccatatcaagtagtggcaaacaggaatgagtgaatgctggggactcagggctgggccaccgccctcgggctgctgctgcctgggaggctaccacgagatgtttctaaatgttcaagaaccagcctctgtatttaagttggaacatgatttaagtgtgaaaagacatttcaagcagcaatgtcctgtgcacaaaagtgcaggttttgtcaagggggaaggtaggaaagttaaaaaatgctcacatttgcctttctctctatctcagctccaactgtcaaggtctggctcctaagccaccccctccatacaccagctccaatcaggaggaagccctcccacctgagaaggcccggagctctcgaagcctgcctctgcttggccttcatcactagtgtgtttctgacctaccgggtgggttacaaatgctgaacgttccattgtttgggggtgatttgtaccagggttcagctctctgactaatgggcagttgtctgtgaatttttctttctagcatatgttagatgtacaatgtaaagctaattaaaataaatagcttgcagagcacagagttgcagagctggagggggaaccttaggttgtttttggaagcagtgtgttctgaaataattaagttacttaaaaacccacttccgttgagcccgatgagttggaagcaatggaattgggaaggagcacttgccgaagagcaaaatcaatggggaagattctattagcttaattgttttttagtttggtgcctggagctcatccattcttcaaacccagggacgtgactggcctattccttcctcctgggccaaggcccatccctggcagggccctgccatccccctgccaagtgagtcagggaatgccctggtctgatgctgattctgactctcaggaagaggaagcctgctccccacccctagccatggcgcccaactccccaggtgggatctaatttgatacctagcactatctttccttaccaacattcgtgctcatgaaagagaaaggttacctcaactcgtgagggtcagtgatagtgatgtcactgaactaaaaaagcaaaagtatgtaaggagggtaagttcttttgtgaaatgaacagtccctccctgatgggggtttacggtgcctctgaacagtctatgtgaggtgaggcagaccaggatcctgcctgtgcttcaaagggcagaaaaatttatcttctatatgttcatagatattatccagctttcctgaagctcagtgctaggccccttccttcaggaagacctccttgattgcttctactctatagctctctctctcctgagcacctccagtcctgaccgcctgagccccacactccagcccttgccccatgaccagcctggagctgtctaggtgagtgagtctggtcactctgatcaatgtgggggctccctgaggacagggccttggaatacttgtttcccgaatatgatatctcatggtggcactgatcatggggtgggcttgcaggtgggagggggtcaggatagaaatgctgcaaatcagagacctttcctctccctcacaccaatgcccatggggtcccaagttccatggattctgtctcctccttttctttttccagagtcaactcccctcctgcccatccctccatctgctctctagtcttcttgcctgggctgctacaacagcctcctctcctcttgcctccctgcttcttttcttgccaccttgaccatgttgatttctgcttaaagccatcagtggctctttattgtgctcaagaataaagtccaatttcttagcatgatagtcaaggcccttgacacccaggtcccagcctaactgtcctgacccatctccagcattctacatggccactggcattggcacacataggtttggcacataccctctttgtgtggatccaccacttaaagcacctcctccttcttacccactgctcacggatgaactcctacccatctttaaccccacactcaaatgccgcctcctgcatggagccatccccgacacccttaggtctgaagcagtcctttctttgtttcctcctctatcccttcccttctcttgtaacgtagtttttccactttattgcccttgaaccacaataacacatacattttatgttataatccagtacacacacacacacacaaacacagaatccagctgtactattttcctttccagcctattctaatgtcttctattcatttcacacacactgatcatgacccactaaattgactccacagtccactcttgtgtcacaatccatagtttgaaaaatacaaattctgttttagtgcatttgccataattcactatgaacttcatctctttggacctaatccttcttttctttgctactggacttgagctccttggggatagacaagtaagtagaagccatattggagccaccatatctccctcaggacagagccattgaggaaatgtcggctgaacagaattgactcagacctgctgacccctgggaaagcaggtgggatgcagaagcgggaggggacttccctctctggcagcccagccctgcctgcagatgagcttctggttacagacactgggtatcaaaggactggaggatagatgtgccccactcttcaggggagctgtctgctgtggccaatgagggcactgggccctcaggcacagcctcggacaggagggagtaagacagaaagaatctcatccaccccgtgggaaacgtagacggatgggcacacactctgagggctgatggcaaggctagaattgtggggctggatgcagagaggtgggtgcccattaccatagcaacacaggtgcccctgctgaggatcagtgctgatgatgtggagtgtgggcttccaggggcattagggtctgaatgatgcaggcagggtcttctcttgcaggactctgtagtctgggaggcctggtttccatgcccagagtggcccaggcctgccaaaaacccccattacaatgggctctccccgtttcagatgctgacactttgcaaagagttcctggttcaggcagttacctggggtggtcctgaagcctggctgggacatgagaccctatattctagctgtagttttgtctctagatagctaggtgaccatgactaagccccttccctcttggtctcagttttgcctcttagaaatattacagtaaattgattctctatgatgttattggcatctcaggtggatcaattatatgttatgtgagactccccagtctactaaatgccagttagcaccctcaagctattgtgacaactccaagcatcctgacatcaccatcaaatggttggcacttctatctctgataccttctggaaagacatggaccataggagacagggaccatgagggactacttttggtggtagttttgggggaaggagtacaagggacaggggtaggcatggggaaaagagttaatgggactgtggtaaggcacaacaatggggtcattggctatttgcaaagaaaaggacaggaagtgagggagaggctggatatggtggctcatgcctgtaatcccaacattttgggagaccaaggcaggtgaattgcttgagcccaagagtttgaaactagcctgagcaacatgatgaaaccccatctctcaaaaaaaaaaaaaaaaaaaaaaatagccaggcgtggtggtgtgcgcctgtagtctcagctactcagaaggctgaagtgagagaattgcttgagcctgggaggcagaggttgtggtgagctgagattgtgccactgcactccagcctgggtgacagagtgagaccctgtgatgatgatgatgatgatgatgatgatgatgatgatgataatgatgatgatgatagaagaagaaggaggatgaagaggaggaggaggaggagaagaagaagaggtagtactagtagtagtagtggtggtgagggagagaaggtgatgacattgaggtggggagggccagaagcaatatttacagaaggaatgaagtcactacatgggatcggaactttcagcaccgcggacagcacaactccattcttcatccctgcctatctctaaggttggggacctcggagagctcctaagaaccagccttcccacccgatattccgaccttggccatgggcccagcccattgaggtcaagctaattcatgccccttttcaaggcccagctccagccccagctcctccaggtagtttccatgactgttccagctccccaagggtccagctgcttgtgactgcctggctcatgctaggctgggattgatctttcactgacccctataaaggtgttgtactttcctaaccagcccaggttctctggagcagaagtttaccttattttgtacaaggctgagagcctctaaaggcatgtcctgggttgctgtcatctctggccttttcttaagcactgcacagagctgagcacacaggatctcaggatggaccaaagctgatgctgtttcctaggttacttgggaactcattgaaggtaggaggctcagagtgggccaggaggacagtctgccaccttgtatgcccatgcttcaccaagatgcatggcaaatacaaaacagtcacacatacatgcaggaggaagcaaggtctcacacaaagacaccatgggtaggctgacccagctgccaaaactgcagacattgcagtccaaccccacatgggggaggggtgtcagtctcaaacagcaaacctgtgggcagcattctccaggttcctggcatgaaagctttgactgttccaagggaagcaagttggaaactgagttatcaggcatctccttgggaattaggaaggaagacaacttctgcatttggtctggtgggaccagaagagagaaactgacacatctggggtcactcaaccatgaagaggcagaagatctctctcccttgggacacgcttcctcacgggagaccctggagttggtgtacctaggagagacagactctccctgtgaccctgtgtttcagcagatgcagccagttatgccacctcttcagtgtcattaccacttggtgtccagatcctcagaagagaataccttaggggccagatatcccaccctcagttccctttactgcctgtagttgggccactccagatccagccatcttcttgtctggcctggggcctagttgagaaatctttgaccatgactttgagtcacctttcttacctactttttttttttttgagatggggtctcactctgtcacccaggttggggggcagtggtgtgatcttagctcactgcagccttgaactcctatactcaagtgatcctcctgcctcagcctcctgagtaatgggactacaggcatgtgccaccatgccatgatcatttgttatttttttgtttgttttgtagaaacggggtctcactatgtggttttggctggtctcaaactcctggcctcaagtgatcctcctgcctcagcctcccaaaatgttgggattgcaggcatgagccaccatgcctggccatctttcttgctttctgtgggaaaaacctctcaatcaatgtctcctcccagcttggcctccacttcctggagtggattgcttttcatccccagttaagagacttttggggaaggtggacagagctggggtggtcagacgtacagtcctagtactaacagcatggttttcctgagcttcccaaacgaggtgcatctccttgagtcagcatcctgcattgcttggaggccactgcaggttaaggaggactgaccaactttgaggcccacctggcatatttctgtcttgatccgatcacagcaaattggtggtcagaggggaacaggcagctggtgatgttcacccaagctcagacccagactgacgtagaagtgctagattgagtttgggagtctaatattgccaaccccagccactgggtgggaaaggcatccccagggccctttgctggtgctgtctgggattcaggccagggaacttggattccatttcttagtgttatatggacacagctctctgagcctcgactgcctgttctggaccttcagagaccctcaactccctatttccacaggacttttcactcatggtgccctgccatccttaagcaggacctgtaagcacacttacaggagacagtggggaaactgagtcatagaggcactgagcagtttaatggagaccatactgggtctatgaaaaagggaagggggagtggaacccagctcactgtgtaagctctgccctccccagagaggggcagtgggaggaggcccctacctcatgctcccgcctctactgtacagggctccctccttccagccatcctagcaacactcagtgggctcgtcgccatgacgccagcctgtggaggaaagtggggaggggaccaacacaggacccctgtggcagaagctgccttggaactgagaaacatcactagaactcatcaagccctccacccacctggtgcagatgaactgaggtctgaagaggggagaccacctgcccaaagggagaaaagcagtcagtaggatggccgggattagatctggctctcagttcctagttcctatgaagtaatgcagggagaagacagctggctggcaggatgccagcagcatccctccaggggggcaaggggctgcctttctctacaggcttttaggtaccagaccttctcaatctagatagacagaatcctccctcccaggacatccccagaagccacagagttctgggggctctcagagatagcaggagaccaccaccccagaatgaggatagccattcttggtgtgagcaggatttcccctacccaaggacatgatggcccctccttccaggccccaggccaccttcaactcccctccccttgctgacaatgccttagctgtctacagggagccccaagcagcatcatctcccctgtgtgccatggccccacgaggtcagcatgttctctgtccccttcacacagataagaaaactgggacttggacaaggagggcctgccagtccctcagtgagtcatggcaaacccaggacttagatccagccctgctaaatctgagcccaggttcctcccactctcccttgccccagctgctctcctggcaggtgctgtgtgtgaaagggaccgcctgcctgactctgaagcacctggtgagggtgggcagtcagaggggcccaaatgcctgtacctggggcccagccaagaagccctgtggggagctccctgaggatcactgagatggggctcctccttcagcccgtcttcagggctccaggctctgctgtggcactggtggtaaggagtgcacagggaaggatgctgggacctctgacttaaggagcaggtgggaggagaggaaagggccaaggcccaggtccccagccagcccttgattgagatttagatggcacattttgaaaagcagtatccttccagagtattctggtcctgtgccatagggctacggacaagcagccgctgtctctaaagccagcagaatcgaggcccatgccctggtccaacatttgaggcctccatgatctggcttattcttccctccctcctcttccacttccgctcccaccctcccttccatctgacacatcattagctcaatttttcaaggcactgttcaacaacacttcctccatgaagtcttccaaatttactttcccttactcttggaataactcccttccatgtgctctgactgtcttcactgtgctattttacttgggagcctatatcaaaaagttctctttgagagtctgcctgtctgtcactcttcctagaacaggagcccctggaaggcaggctcaggtcttatgcatctttgaaaagcttgtctctaggctcctcaattctttctgggggaaagggtaaaatactcagaaccccaataaggggtgagcctgagcaagacgatcaggtggctggaggattcctggggagagcaggagacaggaaagatcaagatgcatgcagaggtgggtagaagctagagcagaagccaggagttcccagagccagcagaggcctatcagggcccagacttgctgtagaactctgagcagctgtgtttccctctcctggccagtcatttcctacccttaagtggggaggggaaggctggactcggaacatagagcgctctgcagccgggcagctctggggtgtctggatggccacaagggcatccacttctgctctatttctcttccttccttcttttcttagctaaacctctgtgatggccatgcctgtcccaccttccctctctcccagcagggaagttgttctcacacatggagtaacttgtggcccttggagaatggaatagagtcaggggggatcaggtctcgctggagtctgagaatgcagacctgagtttccggatttacagcttctacttcttcaacccagagggcagggtctatctggggtcctcctgaggcttgcacccctgcactgcgcctgtccttaacaaatgtggcatcccaactgctccaagacctttaaagtttacccccactccctccagaaagcctcccaggaatgtcccagtgtccaccaagcccctcttcccgatctctgactgttgatttgcacaagcctccttgataagcagcctggggcttcctgagggcaggtctcagcctttcttatcacctctgactcttagggctgaagaagggattcctgcataagcaggcagacccaatgggagagacccctctggctggagaccactcagcttatgtgtttccattgtaacacaatcagtgcttaagcatgtctctagaatggggttctgggaagtggggacccctaacctccccatgtggctaggttagatgggatgccccttcttcccctgtcctggcagatgcctcagtacagatgaccccagccattcccagtaggacattgcggagcttgaggtcaaggaggctgaggctcagccaagctgcacttagtggttccacagaaggaaaatggaccatggccaggagggaggtggcaagaccctcctttgcagccaaaaggaccgtagggacaggcaagatgaggtgcaggaggagggcagatagaaggagggatgggagtggggagacagtgggtttggagatggagtcgggggatgaagaaggcagtagggagagatggagaaagagagagagaggtagaaaatgagagaatctgagaaagacagaaacatacacccagaaacagaaccacacatagagaaaatcagaaacagacagggagacaatgagagagacacagagacagagatgtacacacagagatgggctcagaggagtccgtgtggaatggggagaggtgggaggaaaatggaatataagtgccccacttctggccaaaccacttccatgctaatccacttcctttcggcctacagacagggagacaggcccacaaaagggatgagacttgccccaattaaattgtatatggacatttaggattgtttctagccacccaggatttgaacctgggttcggagaatcctggggtaagaccgaggctacctccccgcctagagctaaaatgccagatccttacttcccaggatcccttgtagccagagctttggcatgggatttggggctccacatattcccccacccatcagatgcacctacccgagggaattagtgaactggaggcccccagatggagacagggagaaagcctctccagagataactgcaggaagcttaagactccaggttggccaggtgcagtggctcacgcctatactcccagcactttgggagccagagacaggaggatcgcttgagtctgggagttcaagaccagctctggcaaaatggcaagatcccaactctacaaaaaatttaaaaattagccaggtgtggtggcatgtgcctgcagtctcagctactcgggaggctgaggcaggaggattgcttgggcacaggagtttgagattgcagtgatctttgatcatgccactagtggtggccagggctggtggtgttggcagggcctttcagggagagggaggtcccctcacagggccagctctgccctgtgttcttggcttggggccccaaatctggttctctagcccactcagtgattccataagctccccaatatctttttaaaaaatttcttctctgcttaacctagcagagttgctttttgaaaggcagcagaacctgggtttgaatccttgttctgttacaagtgacttcattgctccacacctcagtttccccatgtgtaaaatgaggataatgccatgtctctgtcactcgatggtgcaaggattaaatgagttaaaccacagtacaaacatgtggaagctcagccactgaagcgccagcacaggttgtgtagagaacacccaaggagactcgtgtgcttaacttggctctgccactgactaacatgtgtggccatgcgctagtcccttcccttcccttggccctgctgcatctggaaataactctgggtaagatggctcaaggctctgacccagcctcccaaactcacacactgtagctatttgctaaccccacatcctgaggacttctaaacgccttatctccactcttggtgctctcttgagcttttcccccacccaaccagctgcttcctgaacatctccactcagctgtccctccagctcctcaaagtcaacacatccccaactgtgctcagctgtttcctgtgtgcccaacctttaccttgccatctctcaccatatcttgtcaatttcaaatgcccaaggttgctggcgtcttcaacctcatttgctcttacagcctgcggtctacctgggtctgtgcagaaatccccttacttctcctttccctccagaggacagtgtgctcccaaaattgagcttctctgctcacaagctcacccaggctccctctccagatggtgaagccctgtagaatgccctgcatcacctgacctccatgcccctccccagcctcattgtttctttctcctactccctgttctccatacaacacactcctcccaaggcacaaagcccagcctgtctccttgcctttgctcagtcccctcagcctagagggcctctcctgtgcctattacactcacctgctaaaatccaacctgtccccagaagtccagctcagagggctaagtcctccctgatcctccaggccggaggtatgagtcttctttccaaacctctaagctctcctcgcaaaccgaatgcctcttgtggagggagtactgccccatggttaatagcgagggctgtggattcacctgcctgcactggtgcataggagctgattaggactttcaataagttacttcatgtgtctgagactcagtgttcttgcctgcaatatgggcataaaagcagtatgtatctcagagggagtgtgggcgagtgggattatggatgcctgagatatggatacaaagctctctcagtggtagctggcacctggaaaatgatcaacacttagctttgtggcagattctctgtgctcagctgagttgaaaaatcgcagagactaatatctaaactgctatccccacccgggcgattcctgctctctaaggaatgaggcttcaatgcgggtttggctatagcataacaaaattggggcaggaagtggagcctgaacgctcctgttcttcccctaggcttctcgtggaggtttctccctctgtcattctttttaaaggaaggatcccaaggaaaaggcaaacagagaagcaggaagcagcactgatgtgaagaaaggggaggagggaaatcaatcatgcatttccacagccattagcagcctctgctcttcccacctaggctgacctcacaccccaggtgctggttagtggtaagtgctccccaccctccacaagctcctctcattctccagcagttgcagtgcaggcagcactttggtctaaatgaagaaaattgttcattagataccaggggctaattggccctacttttaccagcctgggtggtgccccaaccttttatcagcttctcattagacttaattgatatgaatggcctgatatgtgctgtctgcagcacctttgggaagtcttccttgtcaccccgcccccacaccccaatcccatagaccttgtgcttcccccctaattagggcattcatcattctgttctttttgtctgttgcaattgtgagtgagagcctcaatacagtgcctgtgcagtggctggcacatagtgggtattccacaaattgactgagtattactgtactcagcttggctatgaagaagagacccaggccctgggaagggggggcccccaggctggtcggggagaacaaggcatagcccaggctggggtaagaacgaaagcagagctccctgaggttcacaggctgtgggctgagatgctccatcaccccactttaccctggatggcccttaatctccgggcccagtctgaatcaggcatgctgatctccattgccccaccccacacagctcacggaatcctaaaaatacagttttataaggtcaggactaggaaggcacagggaaatcattccttctgcttgcacacctcctagcttggggatcttacttccttctagggagatctgttttaatcatggatgggaagcatgtgctccctgggcccaccagagccctcagctggtgcagccaggagagtgcggcttggcatcaggtgcaggtacatctctcttgccttctaaccatctctcatggcaaagccctcagcctcagcttctgaaagcttgtgtgtgtgtgtgtgtgtgtgtgtgtgtgtgtgtgtatgtgtggtggaggtggagctgggctaccaatcagacacagacactctgaggatgtttccaggatgagaggcttcagacaaacaatccagatagggtctcagcgtgcttgacaactggggtccggctggagatatcaggggggttctaggtggggcagtgattgctgcccccacagcctcccgcagaccacacacctggctcccatcccatgttccacagggcacagacaggcacctacccacacgcacacacccagaacccacactgaacgaccccacctggaggctgtgtaactccagcaacctctactgcccttttccccagagcctcaagccagtccatgatttgccaggaggaaggcaggcacaggttgttctccttgagagatggtgttggggtgctgattcagacaccactcattatgggggcgcaggaataatgctgcccacagcccctgactcagcccagcaggtcagtcctgggacctcggattagggaagatgcaacaccccgcaccctctggcttagcagaacctacgcctgcatgtcctccccacgaaacatgcgctcgccccagccctcctgcctcctaccctcctcctcccctctggtagtagggtctggtcactgcactcactctgggggatttgggacttagcatatccgccctcctgggataggtccccctcctgggcaggggaagcattgtctaaacaatgaagccctaatggggaacttcaggcaacgggaacctacaatgagggaaggaggtttacactccaagaggaggaagtatttccttctcccctttttgggctgtcaccgcatggagcacgggaattgtgggcaaatcactggcttactgagattagacgctgtattgggggtagaagcagaaggcgcgcccccaacactgtaaggggtccttaacgcccgcggtccgcggtaccgcggccgtcagcagctttgtaccgctgggtccggaatcctctttactccctaaaccgccttctcaggaggccggtgtagagcaggcagcgagggccgggggcactcacgggtcgtgttgtacttgacgccgttgaagtactcggggcacggcctctccacgagggctccggcagcgctgcggggccagcacgttccgatctggtccaaggtcgtgttgcagtaggagtagggacctggcggcgggagagagcgcagtagggctcagaggggcccgcagggacgcggggctctcggagcgcggggtcaggggcgcacccagcgcgcgagagaaggagcccgcgcagcctccgaccgctcgcctcccgcctaccctcggggtccaggggtggcccccagccgtccaagagcagctcttcagccagcgccaggctgcagttggcctccagcaggctgtggagcagtgccgcgtccatcgcgtcccgcagccgcgtgcggagagggagtgggagtgcgcgcccggcgtgactgcgagggagtggacgcgagagtgagcggccgagagggcgcggggtcctggcccccgccagcccagccccgatctcccgggcagcctttgggcgccacctccggtcgcccagagctgtcaagtggggaccttcccggagaggagccgccgagtgcacggagctgcgggtacagccgctccgccgcggccaatggctgcgccggggggcggggccgggcggctcctctcggaggggctcagtctccagcccccgggccctccaccctgcccaaagtacggcttctcagttcgcagctctcttccactcgcggcgtccagaggagggcggtgggctggagagcgtgggcctggggtgacggaatgctctgtgcggggatcgcaggcccccgagctgcagggggcagcaaagcgcgcccacctgcccgcctgcccgaggagaacaccgcagctctgctaatcgagggacagccgcaacccaaagttcggcagctttccgcctgagcttcccctccctgagcgaggacactggagggaggcagagacggagagcccatgggcagatctgcatcctccaaaagcctccatagcctctgggaaggaaatgtatcgaggaggcctggagggaagcagggagacacccatgagtctaatgagatcaagtggcctgagtgggttgaagtccttggatcagaccgtggaagctggaatggagagagatttcggaggggcagccagacctggtgaggaggaactggagtgggtggctggttttaagtaggagcccagaggcagggataacatcaggtctcctgcttgagtgactgggtggccatttaatcagatggagtaagtctaggggagaaattggctgaaattatctggaaggctttatacacccagttgttagtgccttgggcaccagaaagaataaaggaagaagtgagaatgtgtctctcttcctcaaggcttgggcagggcttcacctgaccctggtttccacaccagtagcggggcaggggcggggagaatcaggccccacagcaggtgtggaggagctggaaacctccccagagaacttgcccaggccccccaccccaccctggcccagaatgcctccttggtgatctgctgtggctgcaccctcagagtgcccagggcgggcctgctgtgtctgccagctgagtggggcattgggctcgggaagcagggcctggggtaaggcatgcttccactcaggctgcattttggtccagcctctgactctgctctccctgccatggtaccccaggcaggatgcttgccctctcttctggagctttctccatcagtgaaatcttccccgaggcccctctcagctctgagactctctggttctgagttatgagacggagagtctggggaagacatacatgtgtgttgtgtgttgtttgtttctatctttagagggcaaggagagctggaacctagtctcagaaaccagtcctgttcccctgccatcctccacataaacctaagctgctaggaaaggctgaaaccaccatgaactagcaccatgccctgggcagagagaggcaaagcagcaggcaggctgcttttgtgtgctccgctctcaccagcctccatattaatggtgctgtcactgcccaggcagagcgagtgagaccacactaagaccagggctgagccctggaatctctccagggcctgctgactggcaggaacaagatgctgagcagccagccaggtctaccctctgcctcctgaatggacagtgagagcccaggctcagctctgggcagctgcagaggtagaggttccttggtcttcatattatccagtgccaggagcaggggaggacctaggcagagtcctaccctccgctcctagactgagccctgttacccagggtcccacacaggccagagggtggctggccaggtcagcccatgtattcacagggcaatagtgtccctcatatacaagggatagcccttcacacagcacggtgcagcacagaggaagggagaaatcctaagccaagcttaagttattatccttgttcattactgcagccaccacctaggtggtgcctaaagcacctatagatgcagctatgtcaagaggtggtgtgctcccaatgaccagaggccagggacttctcatctcatgcagatttctgcagaacagagggttggcctgggtgaactggattgctcttaactgggagagctcacataccaaagattcttctgggaagtgaccatttcagtggcagagtcaaaggctgttctgcatcctgaatgagcagttggggtctgagcacatacccacagacccacagacccgaggtcccctggatgtggggccatttcttcatggatcttattattataggcacagttgtcattcgagatgtgacagagggaaaactagaaaaggtagcagtttgggaacaaattgattttacagctcactttagtgtctgcaaacaggcaaatgaggaagaaattgggaagagccccaaaattccctcaattttactaaatccaagtacaaacaaacaaagacaggggcatttttgctaactaaagaagcagaggtagattagaggctttgggatagtgatgggttcccagcgctgcaggccagccccatcccagctggaggccaggaattaggggataagtatttggaacagtttgtgtgtccccaagctgttggggacaggttggcaaataggttcagggaagtgtgacaggtactttggaagacccctgtgtaccatgagcagcagagtaaggcaggtgcctctggtgccctgcatcccatcccatggcccacctctgatgtcagctgcagcagcagtggacagttccaggccagctcagacacacttgcaaagcctaatacatggcatcaaacaggcatgtaggcacaacagaatcacacacagagccacagttatgcatcttcaccatgcacacacattctctctctaattcatcccctaccactcaaatgtcagctggaaaacaggatttaaagggacaggatgcatctttgcttctctaagggactgtccttggttagactacatagagagggagtctattcaggcacagctggaatagtcgtggtgtttcctgggaattacgacggggttgctgagggcacagaggttccagaggggcctgaaggtgctgcacttttgccctgtagcactggagacaggggtcccaggccaggcaccccctcctcaccctatcctactccactgcaggacagaggaattggcctggtgtcttcatgtcaaaccatgggactaagctgtggggacagaaaggactctcagtgacatccaatcccacattcttgttttacagatggacaataggattcccagacaagcaaaagaggtttccctcccttacttctcccaggccatcctcatctctgcagcagcccaaatgggctccctgtctcctcatggcagataaaacgatgttttataattacgatcctgtcactcttcctcataggagtgccgccaacccattgcccttgagatggagaccacctctttggtattgcaaagaaggtccttcgtaatcatctatccctcatcctcacccttctgctccatttgaaaggccctccagaacaacatgtcattcctgggaaccatctttggtattgcaaagaaggttcttcatgatcatcgtcccccatcctcaccctcctgcttcatttgaaaggccctccagaacaatgtgtcactaccagaaaccattcgctatctctgttccttgtttgtatttctgcactggaaatggccttacagctccacactcatccttcagacatgcagctccttggtgaccccatctgctgggtgctggcctatgtcacatccaggttgctttttattcattgtctcatctaccagcccatgcctccccaagggcagggctggtcctggttcactaacccatccccagcacccattggaatgctctagacttcagcccagtgagtcactaagaaaggacagataccttggcagaagagctgaggaaagcccaggtccctgtcttcaggccaaggctctcttcccatttgaccaaccctggcatatgtgtgtgtgttgcattgaggaattatttcaaggtatctttgaatccattcggattcttggccaggtgcagtggctcacacccataatctcagcacttggggaagccaaggtaggcagattgcttgagcacaggaattcaagaccagcctacaaaaaataataaaaaataaataaatagtccatttggatttttatatcatctatggataggataaataatatgcctcataatatatgccctaatatttttcaaatatatgtagctgcctctgtgatgaataaaatagaaataatctatttaaaccctgcctgaagtcataattgctctgtgattttgcatgcgttgcctttttcaggggcatacaattgaattgatcatagattcgtgaccctttgtcattattagtctgtgcattagcccatgcatggcttaactttattttttagtctttattttatttagtctttttattgtatgtagtagacaatataataagcctaccacccaattggaaactacatcattaccagtcacttatctatttatttctattctccttccccagagggaacattcccttgactattgcatttgtcattctctggctcatattttttttcagttttctcacaggtatgtacatctaaaagatatagtgtttggttttacttggttttgaactctgcgttagacatgatgcatttccccaagcagtggacactgaaaagaaggtcattatcaatttggggacttgagaaatgattcctgaagctcgaggggctccctagcagcctctacatccaccatccggtcatggttcatgtggggtgatgcatccccagagtggctgctaggcagcgtcacaagcgatgcggtggttgaatatttaatgacatggggaaatgttcactctgagttataagaggaaaaagcaggcgacgaaactatggacacactattatcccattaaaaaaaaaagaaaagaaaaagaaaataaaaaaacaattgaacatgaggctctatgaatgcataaattcttgagggatatgaggcattataaaaattcctgggttgtgggagaatgagtacttatcatcttctcctttgagttaaatttttttgtgcccaattttatagaaatcatgtggatcccttttgcaaatggatgaatgctgttagaagctgaacaggcaaggctgtatgtttggagaagctgggaccctatccgctgcactcagagcggggaccatccgccaagggagacagggaagggtctgtgccacctgctggagggagggcagaggaaggcagggagaaggctatgggtctgctgacaaacccacgctgcctctgagggtgagggaaggttgggctttcctgaagggaggggcctccatttcctgtctgatgctggcatggcctgtgctaggtgtccccgtgggctctcattcagccttcactgtgagcctccgaggtggacttagatccattgctaaacagatgaggaaactagcttcagatggtgtcacaggctgaactgtgttgctccaaaatttgtatgttgaagtcctaactcccagtacctcagaatgtggccttgtttggatttagggtcttcgatgaggtgattaaagtaaagtaaggtaagcgggctttaatccaataggactggtgttcttagaagaagaagagattgggacacagacatgcagaggagagaccatatgaagacatagggagaaagatggccatctgcaagccaagtagggaggcctcaggaggaaccaaccctgcccacagcttgatcttggcctaccagcctccagaatggtgatgaaatcagcttctgctcaagcccccagtctgtggtgctttgttccagtggccccaggacactaatacagatgggttaggtgagtttccaggggctgggcgaggccgctgggtggaagagctaggatccagacttggatctacctgatcccaacaccggagctattgactgccccagtggaaggagaacaggcagcaagactttctctttgacgcctggcttgggcagtgcctgtaggctgggtctgggtgctggccagcacccttgtctccttgtgccctggcagtggccccaggcccgagcaagggtcacccccactcccatcctgtggatgcagacctgggaaggccaggatacagggtgggacactggagacatctctctggaacccagcagaatccagggctctgtgcagctctgcagtggctggccctgaccctgtgaatcagccactggaaacctctgaggggccagaactcagggccgggctgctgctttgcaagtccttaccaggaagtcacacctgtagccacggcaaccagagaatgtttaccaccttctgccagtttccctggagttggaaagctgaggggtcatccccttcttggactcctgaatgccagcccagctgacttccatcgtgggagctgggaatggggagtggcctcccagccaagcccttcattatcagtggcaagcctgagcctagaatggggaagggcctgcgtaagggccctcagcaaggcagaaatcaaaccaggactggaaaccagcaccccacccaccaccctgctgagcctgggctggccccaggaaagcctcttcctcccgcagggcccacccacatctccaggggctgctgcagggtggtggcagagggtacctacctgagaggttggtgagggtcatgatggtgtggcagtactgctccagaagtgcccacaggggctggtctttgggcatctggctctgcccggctgcctaggggacagcaaggatgagggtcaaagatcaggcccaggctagccattgacagtgcctgtctgcccccatcctatcctatcactcatcccttactcctcttagtacagagagggagaacaaggagggagatgcccatggccacatggagcagcagcagtctggcctgggctggaccgaagaaaggcctcagaagtggcccaatgcagtgttgcctcctaggcaggggtctgctctgtccatccctcagcccccaaggctgtctcctcctcaggctgggatgtgtcactgtcatggggcttgtgtccttctgtcagcaaagctgggtggggggtgggttccattagttgttcattcaaccaacaaatatttgcagaacacctactgtgtgtcaggccctggctgggggaactgatgggtgtccttcaggtagtcccaggccaggtagggatcctctagacttagaaagtgcagaaggaagaggaggcaaatgcatgatttaactttgtttccctgtcacacaggtaagcaggcacttgcaacgaagagcattaggttaatacgtgagagaagtgcctaacctggattcaggaagacagggaaggcttattgggagaggtagcattttggggcacccagaaagatgagtagggacaaaagaagggaccatagggccagcttaggcactcactagggaagatatgtgattgttgcaataatggcaattccatccaaaagatagaaaagcacccaggatcccgtctcctaaaaaatcatcagagtgggtgctggatgtgcacggataaagtagatgtgggcatgtgcacccgtgaagggaccatcttctggtgggaaagatggataggatgtacagttttacggcatgtacgatttactgaggagggcaggggtagcatcacagaagaggtcatgctaatgtgggttttgaagggtgagtaggagcttgccaagctgatcaggccaggaagggcattctagttagagagcacagcatgtgcaaaggcagagaggctggaaaatgcatggtgtatgactgaacgagagcaattcactctaaattctaacgcttggccccattcctcccaagaccactccttttcttgctctatggtcagcgtgtgtgtgtgtgagtacatgcacacacgtgtgtgacttttgtgcccctcccaaccctgagattcctgattctgggattccagaagacactgctccatcagtgtgcagccccttctcttcctgctgcctgtcagatgtactcttcctggcagctgggtcaatgtttgccccaggatgtccccaggggccagagcccaaaagccctcaaacatcacgttctccacattgggctcagtccatttcctgtgctgggactggaagctgcatgctcagccctcaccacgtcagcctggagcttctaatgaatgaccccacctgctcagacaggagagtgctgccccctgcacccctcccggaagcctagggtgaggcagacaccacttggaggcactcactgcacctgtgttctgccaaactcccaccccacgaagtgaggtagagagggaaatgcaggggagcaggtgtgtgtgttgtgtgtgtgtctcggcactgtgggggcctcctgagctgtcagccaggagttctggcctcttggcctgcaggacaaacactgggggccatggtcttgctgtccacatatcaagggagctgctgagagttcctcagctccagcttctcgggcatcaggaagaccttgctgaccccgtgagccactgccaggggttggggggctggggaggggagggaacactccagacactgagaccttccaggaagaattctcaggccatacttttggctgggtctggggacagtgagggctctaggtctgacccatcaccctctttatggcgcccatcgcccttgtttgagaagcagctagtaatgccctctgtgggagggttcccagtgaatcccagcctctggaggtcagggtacgggcaacccagaggcatgcagtgtccacggtgcgcccttaggcagatgcagccattccatctcagatgttagtgccttctctcaaagcccctgagctgtgacatttgtagccccatcactgaggtgatctcctgtttgactttaccggggtttctgacacatgctttgaacccatgatggggtcagggcatcctcccccaggactcaggcaatgtgggatggtccttgccttggattctgtggtctcaggctgtggccatcttctggctgagcaagcactttgtggggagtgggcacagggttaccatactctgcaactgatgcttgctctttgggtctgggcaaaatttggtacaggcatatcagaagtaatttttggagtaatcccagatcctggcttcatctcctataacttctctgctggccccaaaagctgacacagccaaagatactcattctcttcaaggggcttgtttgggtggatttgactcagtccgaagtcgtaatctaccatgcaggtgtcaattttgggcagagcccctagtggtggtggtgatgggtgggcagggaggaggaggaaagagaggctgctgtcctcagaaaacacatggtccaggaaagtcagggacagacatatcttggataatcccattccaaggacttgagaagagctgtcagagtgggtagagtgcacacatcccagtgtgcagagttctggggatgctgggcttagctgtgtggccttggcaagccacttaagttctctgagccttgatctcctcatctttaaaatggggataatacaaatcccacaggattttgtgtgcattcaacaaattactgtaggtcaagagcctggcacgtagaatgcgcacgctgaatggtgactcttggcaaggactttaggagggggctagttagagagctcagtgatgggaggtcgagtcccctcatcgggactcccaaggcccagctcaagctcttcctgcccagaaaagcttcctggaaaccctgtgccccccttccccagctctccagtcagtgtgggactccgtttgccctcagcagctttccctcggacaatgggcccctgaaggtgcagcctccatctccctcactgagctcgcccctcagcggtgctcagtgaatgctcattgaggaaaccgaaggccgttcggcgaactggacattggagcggaatctaaaaggatggaaggacttgggccataggaacagcagtaagaagaggagaaagtgacccaggtagaagctgagaaagcaaaccctcagaggcaggcgagcccagggcccacacaggaaactgcaccatctggtatggaggtgccaagagaagaagaggggagacaggcaggaaggggaggcttctttcacgtgaagtcagcacttactctagtgctagacctgcctctaaatgccctacagaagacagcggattgaatcctcacggcagtctctgaggtagctgcaaataaccccatttcacagatgaggctgctgaggcccagggaagcgaagtcacccaccaaaggtcccacttcaggtaaggggcagaggcaagattcaagcccagtcagttggtaggttatggcttggtcaggttcccatgggaagagctgatcctgggtgaggaagtgaagacctgtgggtcacggatgctgagagggccccagccccagactgggtggctgtggggctcaggaggccgctcaggtgagaagcccctctcttgccacagaggaacaggggccttggaggcagacacctgggtcacgggaggcagacccagccagtgggcaggaccttgcacaagagagatgaggaattataaatattaggtcttagcccccagttcctgacacagaatccctaaaacctttggaatttcctgggtgacaggagtgtcgttagttctaatgaggtgactcttggtgggctgccaaatgcagctggttaccagagagaccaagccatggttagaaggttggagctttcagcaccttcctacaccttggggaagggagacgggctggagattgggttaatatgcctctgtaatggagcctccgtgaaacccctcaaaggtgggattgggggcttctggttggtgaccacctggtggtgcggggagggtggcatccagtgagggcacggtgctctgcgccctccccacagcttggcctgtgtgcctctccatctggctgttcagctatatcctttgtgatagactttaaaataaacctgtaaatagaaatgtttccttgagttttgcaaaatgttatagcacactattgaacccaaagagagggtcatgggaactcttgatttatatagcctgtcggttgggagaatgagaagccctgtcttgcgactggcatctgaattgggggcagtcttgtgggactgaggctttacctgtggaggctgatgccaactccaggaagatagcatcagaattgaattgaattggaggacacccagttggggtccccagagaagtggagaattgcttggggcagaaaatccacacttttggtgtcagaggtgtgtaagagtgtagagaagaaatggaatgttttcctgtttccatttttctttcttctgaggggaacgtcttggacacctgtgctgattagctcttggctgttctagggcagagagctctccaccatgcacaccccagcccatgagactgactgtaggctgtgggagcacagggtccacatctgtgtccccagtccccagttcagagcctggcacacagcaggtgctcaataaatgtttgtcaactgactgactgcttggatggattaatgaaaccatggccccctcagccaggtagagctacatccccacccctaatcccgggagaccaggttgtgggcttttcctgcttgttatatttccttctctctgaactttgctctgagcctagcctgtgtgagggcccaggtcctggttcccgcctctcagtgcctggcatgggaggccctcaccttagaagaggcaaaggagaggccctggctggggaaggatgcaggaatgagagccaagactccagctgctcttcttccaccttgggtcctatccaaacagaacctgtgcccggggccccgacaggcctcaaaggtatcgcctccctggaacctgggggtctggcccagtctagtgttccctccagggcctggcgacaaagcttctgtctaaatttagcccatggtataagctggggagatttacaggaccatgtgtcctgggcccaggctgccagggaccggaggggaatggggtgagctccctccctgctttctccctctgcttcccaaggtcagagaaggactcagctgggaggggcagcattccaccccatgtttgctttcattcagtggatttcattgagcctgagctcaggccctgccccttagggagcacagagttagaggaaggagcaagaggagagggaagagaaggagaaggcttggaggagaagactggaaaagaggggaggaggagtgcagaggagtaggaaaagggaagggaagaaaggaggaaggaggagcagggaggagaggggatgatgaggagagaagaaggggtcagaaaagggagagggggagaatggggaggagagaaggaaggaaggggaggaagaggagtatgggggaaggaggtggaggagactgggaagagaaaggggaggaggtgggggaggaaggaaggatacaggaacggggaggagggggaagaggggaggaaggtggacatgaggaaggagggggaggacgaggcagtcaggccctgcacagacatagggggcagaaatgggagctgagactggccgaggggcgggcgaggggtggggtgtcagatgagggaagtgggtcattgttttctggtgtgttcaggcaggctccttggaagaggagactttagatactcagttctaacttgtagggtgttggatgttgagtgagaatccccttggcctcctgggcagctcccagcggctttcttgttcctgagtctgtgctcggccaagttcgtcttcctaggatgccccactcttccttcccagttcccctccagctcccccgggaggctttaggcctctcctcattctgctgttctctcttctctctgaacgcccatgaatccctctcccctcagtcctgcttgtctcacctgtgccgagccctgggccctgaacactgactggagtaggagggggaaggggaggggagggagaggtgacttggcccaacataggggcaggaactggccagcaggaggtcccgtagcaggccacttggcctaaagctatctccttaattatcaacacatctaatgtccagtttgcataaaagtcacatctcttctgatttgttttggagtctgtccgaatgtcctaaaaataacttgacattaaaattaaataacattaaaattaaaattttgttaaaggaaaggaatctggagtcaggctgtgggccggaatcctggtcctgccacataccagctgagcggccctgggcacgtgagctcacctcacttcctcatctgcaaaatggggagaggatggttttaactcagggcgttggtatgaaggtaaaaataggtgaggtgcatcagtgcccatgataggccctgtagggctgctaagtaaaataaaataagcttattgaataatctgtcccccatgggtttgcaatgactaaaaattagaatgttgagaaagacaaacatcgcatgttatcacttacttgtgggatttaaaattcaaaacaatcgcatggagatagagagtggaagaatggttaccggaggctgggaagggtagtaggggatgggctaacaggtaccaaaaaaaaatagaatgaatacgacgtagtatttcatagtacaacagggtgactgtagtcaataatttaattgtacatttaaaaataactaaaagtataattagattgtctgtaacacaaaggataaattcttgaggggatggataccccattttacatgatgtgattttctacacattgcatgcctgtatcaaaatatctcatgtatcccacaaatatatatacctactatgtacccacaaaaattaaaaataaaaattaaggccaggcgcggtggttcacacctgtaatcccagcactttgggaggccgaggtgggtggatcatgaggtcaggagatcgagaccatcctggccaacatggtgaaacccaatctctactaaaagtacaaaaaaaaattagctgggtatgttggcaggcgcctatagtcctggctactcaggaggctgaggcaggagaatcgcttgaacccaggaggcagaggttgcagtgagccgagattgtgccactgcactccagcctgggcaacagagtgagactccatctcaaaaaaataaaataaaataattaaaattaaaatttaaaaagttagaattttggaagaagtgactgtagataaactagctgtagataaaatggtttaaattaaatgaagtagaatatgacagctaagaagataaagagtagtcccataattcttaaagtgctgcaaatttgagatttaggaggaatacagaattaagtagccattgccctcagacagatttaaaaaaaaaatactgaaacaccaacaaaatggcaaaactagagactaaattagctagtgaggctagaaaacgctcagaagggagttgaatttttgggaaaagtcattcaatgcattagctgctggcaaatggccctggagccccggctctgcagaccctcagtgtgtgtatgttaggggacactgtggactcggtctttggtgtgagccggacaggtcagggagggtccagggactgccagggacttctctgtgttctgttctctttgttgagccttcttggggcagatgggcccaccagaagccaggacctggggcaagaggtcacagaggcaccatcctgagaccctggggggtgtctcgctgtccaaagctccaaggagctggacttagtcagcaggggctgagaggctcctgtgatcttcacagagtgggaggcaagtggcattgctgagcctctttaaacttgtttcctgtctgtaaataagtggtcccaccttcccggtgtttgagtaaggcgcctaacaccacttaacagctgctagattaccacctgcctccggaccagcttcccgaaggcctccacggggaatagggagcaccagggtcaaggctgggtgggttcctccaggctctcagtgtgccctgggccagggcatcctcttcactcaaaagcaccagctggaacccttacaattgcagatcagaccaggcacctcccctgctcagagagctccccatgtcctcagatcccaccaggacccatacagctctgcagtctcccacataatgtcttttcagggttggggccctggggccttacccccaacctgctcccctatcccttcccttggactacccatctccaactctgctatgctgcccacctcccaccaggctcccccatcctgtcaagggccctcacacctacacatgcttcttctgagcccatttactggaacttgtaaacacagactcctttctttcctgccacacccgcttctgggctataaacaccacaagaacaggaaccagatgagcgttcagaccctggatcctccccatgggcagtcctccttaaacactggatgaataactgagaagcctccaaggctgggctctcctgggctgccttccctcccgactgcctgctccaggtctcatcgtctcaggacccgggaaaaagtcccattgccatgaaggccccgtgagaggaaggctgggctttggcgtcagaaaggccgaggtttaagtgctctccagctgcttacatgctgagtggctgtgggtaagtaactggtctctatcccactccgggatccgcaggagagctaggcgcagggcctgggatgacctcaagggacgctgagaccacagtgttgccctgagaatcctagggcacctctggagcagccagcagaagcttcctccgtctaaccagcttgggcggctggcagcatggaccccagagggacgggctgaggggcaacccttgccccaacacttggatctcctggaaggcacctatctggaaaacaagtgggagagggcaagagagctcaaagcccaagatgtcttgggggcagaggggtggatggtgagccccctgtacaaccttcacccatcccaattgcagtctgcaaagtcactcaaaggactcagcaggtctgggggccatctgcctatcggacactgaccacagctcagcatactacctgcctcccacctctctcctccacctggccaggcccccaggaaggcagggaccctcatgtcctcatgctgtatctgtggcggctggcacaaaagcatagctggcattcactgcgtgctcacaccacaccaagcatgatgctgcttgctttacttgtattacctcaatgttcctcacaacaagcttgttcagtaagcaccgttgtgatcctcattttactgatgaggaaactgaggatttgagtaacctgtccaaggtcacacattaagcagcaaagcagggatctggattggttttgtaggcaattatctgttgaattactgttgaatgtattatcctccttatacgtatagggacactaagccccagagaatggtccccaaagctggtctgtggcagagtcaggacagcgacaagcctcttagcttccacaggcactactttccagattgtgaggcctaggacaggtcaccctaccactctgagcctcagtttccccatctgtaaaatggggagaaggctggaggtggaccactcccaccagcctctcccctacttcttcagctctcttttgatggtcgctctgtgtcccttctccccaccttccatcggtggcccctgactctggacaaaggcacggggtgtggctggatgaagctctgagtcttgagaaacccttggagaggctggttctcccagagcccactctgtccccatcgctcatctggtactgggggctgcctgattccaggcactgagaggaaggatggagacaaggcagcaggggcaggaggtggctctctgcgggtccctgggggtaagggtcagaactaggggtgggctggggaaagaagtcaaggatcttgcaggagagatggaggggggtcatgggggtggggagagaatggataggagacagggaatcttggaccctgaggtagtcaagttctggatgctaggatgtcaccccagaaccctctgcttatccacaggggtctcccagtctcatcctggccagcctcacagtttcatcttcccttcccctgccccctcacccaggcacgggatctccaattcatcatcagacacaaggatccccgatccagcccagccaccaggccctgagaccccctcacccaggcacgggatctccaattcatcatcagacacaaggatccccgatccagcccagccaccaggccctgagacccccgcccctagtcatgagagctgggagctccgtgctcctggcgccccacctcgtggactcccactccctgcacttacgtattggagcggcggtgggaggaggcagagcaggcagaggaggaggtgtgggacgtagaggaggcctgggggccctgagggacccctcatgccagtagtggctgggggttagggactggagcctgctgcccagcacggtggtcacaccctggccagccccaccccacccggccctggaggggaggccaaggtaaggccttgggcatgaggaggtattctccacccacttcttccacagggcagtggtgaccccgccccacagcccacagcctccaggttatttatagctggtcccagacagctgctgctacccagccagccaaggggctatgctctccatccagcctgcagagaaggggttaatgccttctatcggctgccagcattgcccggggctgtagctccccaggtgggagagaggaattgagacaggcaggaggggcctaggctgtggtccctgcttcagcacagggttgggctgccctgggtctcagctgaaccagcactgcctaacacctatctgaggagcttttaacaggtgctaatgcctactgggatgactgagatgggagtgtggatgctgggttagatagtactgtatcaatgctacatctgctgattctgatactgtactgtgggtaggtaagagaatgttctcattcttggaaaatacacatttaggattaaaggggcaccatgtttccaacatactttcaaatggttcagaaataaactcagatagatacatagatagaacaagagagcagatggggcaaaatgtaaattgttggtaaatctggaaaaggggtatatggatatgctttggatcattcttccaacttttctgtacgtttgaaattctatcaaaataaaatgctttcaaaaaaaaaaaaaaaaaacccaaccgacagcaaatacagccatggcagggctcacccagagattccaatgaagtagcttgggatggggcccaggtgtctgtctgtatggggcccaggttccatttcaggaaatggttagggatcctgatatcaggtggctgagcagtgctgttcttggcggggacaggttcaacctggggctgggtcagggctcatgaggtgaggtctgttcttccagagcctcagaagcctccttaggagctgttcctgacaggtgggcctggtgcagggggtttaaaagcttaagccacagttgcaccttgcttgttgttaggatctgaggggaaagcatgtgaggaatgtgattagtggggcaccaaactttctcctggagatgcaggcatggtggagagagaccttggaaaactcagtcccgatttaagtaactcagacactctgtgctccttccggtctccctatctaagacatgggacacttttctgtccttgagtgcttcctccccaccctcagccccttcctccaggcagccttcctggctgttccaggtcccacctccctctcctgtgaaatctcacaggtctgagtctgaagctctgcctcgctggtgtggactgttctccaagctctgggaggataaggatgaatgtggatgtgccccaaccttcctctccttgttttttcttctcccttccctcctattttgtacagagcttagtctcagtggtacagggaaatctttataggaaaaatggaggaagaattgatcggattcctcatttatttgaaggtggcagggtgaaaaccctatcccaagtcctggggcaggatttggctttcccggacccagccagatgggcttggtcagagagggctccttgtagaaggtggatacctcctacaaaacatcataagctgggaaggactttgagagctgggcagactctgaaagatggctgggacagttcccttcagcagccttcagctgtaggtctccaggggccagcctaatagcaggcaccaagagcagaggccagcctcagagtgtgcagggacatgggaaggagaggcatggggaacccatgagacctggcatccataactgatgggaggtgggacatggcacaggtgctgggccagctcaggggagtgagagggcacttcctgggaaggtactgcaggagcaccttgaagggtttaagcagatggaggaatgggagacccttactgcaaatggggaagtctcctgagcagaagcagggagcaaggtctcatgcagctgggagcctggctgggtggggcaagctggagggaagccagattctctgcagctttaggagggtccgggtagcagtaggcactgtggtgcttagcccaggttcctctcttgggggggtgttctgggtgcctgtcttagcttgggctgctgtagcagagtaccataccctgggtggccttaacaacagacattgatttctctctattctggaggcggtgatatccaagatcagggtgccagcatggtcaggttctgatgagggccctctcttgggtctgtaggtggcaccttcttgctgtttcctcacatggcagagatgttggactcttgtctcttcctcttcttctaaaggcactaattccatcatggggattctgccctcatgacctcacctaaccctaaaccctaattacctcccaaatagcatcacatcaagggttaaagcttcaacttgggaatctggggggtgggggcacacagattcaatccatgtcagtgccattcccctggctttccttgtgcttctaaataggtcccttttcacaacctagaactttcttagaactctcctggggcaatgagaaccactttttgcacaaagtacccaggaatttatatcctcccaaccccctaagggcatccttagcattgagtgattggtgttcctttgcctggaggtggaaggaactctgaagtgtaatggacattctagaactccttgtggaaccaggcagaggccgggactctgcctgggatcttttccattctccgtcctgccttgcctcgtctcttaccagtcgctcctgggaacattttctttacacatccctgcacaggaatcctcacctttggggaaccccatctaagggagcctaaatggtcaaagaagtctgtctggacttgatccctctaaatggaaggtgttaacaacaaacaacgacaataaaaaaacaaaaaacttgagcctgcagggtttcctctagacagcctttcactttctgaggctgctggtggtagaataaaccttgcctagcaacgtgatctgagcaggttaataacaacctgctcgtttataagctttgtgttactaagggtagattcagtgtggaaaggaggctttatgtttttgaaaatgccttcatgggcctttttggtgatgaaagacaaactcagcatgatctaaaagagaagtgtgtggaaagagacctaactagctttgtaaagcaaagctattgaaatgactagattgagcatggcattccaagatggagacagtgtagaagggctaggagctgggctctagaaaggaggaggaaaaagaagaggagacacggactggcacaggccaggtccaagcatggatgaaccaggagcttccctatggtggtgaattgtcaatgaatgttatgcctcatcttcagaaaagtctacaatacacaacagcctgtgccagcagtgaaggaggaggtgctggggcatgttggatacagggttaggagaggtgagaggttgcaggaagcgggagctgaactggacatttctttgttttgtcccaagatggtactgtccttctgagaaatgctccatcctctactccaacgctgctcagccttttttttcccattattatttacaaggaggctttttagatatttattttcctaattgccttccctcctaccatgaaattttaataccacagacatactgtatatgtgtcatgtacttgcctctttggagggccacagaccattctcatatcagatggttctgcctcctaagaacggattttgttcccttgggagcaaagaacaggcatgctcttttccagccacgtgatcaggctagcagccagccactgtggattggccaaatgctattcaccaagctggacaatgagagtgtctcaccccgctgaccatggttggttggtacaggaatggacagctgatctgaaattacccaatcatagccctcctctgggatttttatttttattttttgagaccgggtcttatgctgtcacctaggctggagtacagtggcatgatcatggctcactatagcctctaccttccaggatcaagtgatcttcacacctcagcctcctgagtagctggaactacaggcatgggccaccatgcccagctaatttttaaaatggtttttgtagacacagagtctcattatgttacctaggctggtctcgaactcctgggctcaagcgatcctcccatcttggcctcccaaagtgctgggattacaggtatgagccatcttgctcagctggaatttttaaactttgttccaaagagagagcctattcctttctcatgaagaaccagagatgccaagtgtagcggcttcattgagagccaagccaagagcatgggcagagaagagaggaggaaagaagggcctggtagcctttaaggcctcaactccagttggacctgaggctagccttgcccctgcctccagtaagggagctttctaataaaccttcctttatgtttaaagtttgtttctgttgctcactacccctggaattctgaccaacacagaagtgttcaggaattgaacaggagtagactttagagtaaaaagtgaccaggaaaatgtaagacaccccacccacctgcctgggagccagcactgttgcagggagcctagaccttctgtaaatctgataggatggggtggctcggtcattgtatgtagttgtgaaaggaaacggtgactttgaagggctggaggacttagggacacatgtgtccccaagcaggggaggggtaggggagggtctgcattttagaaggtttgctcaggcagcagggtagtcttgggttggaggtggcaagtctggagtgaagaagtcagtgtgggcgaatgcagcagcccaggcaggaagggatgagctggtcctctcagtccaaggaggagtctaaggaaagccggcacctgtcgagaaacggacctctgccctgcatttggggccaccacacagaccacatctctgcctgtgactaagactgctcagacccagtgccataggagacgaggtgccttgggtcccgcagagggagctcccggctccaccccaaccttgtggccaggtgacattccccaggtttctaatgctgtctccttaatttagctgcggtcacaccaatttagcctcaggctgcagactctgctcttgccatgcaatttcagaacacaattttacagcattgttgaaagaacagacattgatttgggtcagttttaattttcatttttaccccatgggttccatgggatgttactttgattccactctcttttttgcctcccaaatcctggttcaggaaggccagggcagagcaggagtgacgatgcagttctgttgtcactggtctctaaagaaaaacaggtcacgtttgattaatagagattaagtcagctctggtggagcttctacctgctcatgaacgagccctgaactttgtgcccgagaagagctgtggagcccgtgttttccggaatagtgcaggctccggtgcccagtggcatcaggcctggctctgtcctgtctgtggtttcacagctgtgccctgtcccatgtgcaggctccttccaggagcaggcgccatgggctgtcctgggcagaaacccatggaggggatcccagctggcgcagggaggctgaggctgccctggagggcttggcctgtgccagggtctgggctccaaccccgcggggcctgtccctgcccctgctccagcgtcttttgtggctcacgagatgcctaacttgctctctccactctttccccctcggttctcctgcctgtaaaacaaaataatacctgtcgtgggtggccattgtgaggaccaagtgaggacctgtgtggacaaactctgcctagaaatgtgagaggttgccgttattgttattttgtttcaaagtcaacaaacactgaaggcctactatgtgcaagaccctgtgcgatgcctgaccatgggtgcttagaacaaagtaggttattagatgtcaagtgaacaaatggacagggaggaccctgggagcctcagggcaaggggcgtggagtggtcaatggcagggtcacacagtgggcaggttctggatgccattacctatgcctgactttcctggacccctacaagaacactgggccggaaggcagaagacagtgtttgatttgaacttcacacaattttatttattgagcaactattaagtgcaggaggcagggagagaagacacagtggttgccccagcttggtgggggagataataagtaaacaggcaaggcctatggggggaggagtaagcatcaccaacccgtgcaccccgccagtggggccagggaaggcagcttaaggaatgaggggacctcagctgggtgaggctggaggtgtcaacagcaaatgagcgagaacaaggcaggcccacggaccagcatgtggtttgtatgggtggcatctgtcatagatgggtgcctgaggggatgtcttagccagtttgggctgcggaacaataccatagactcagcggcttataaaaaataggactttatttctcacagttctggaggctgggaagtgcaagatcaaggtgctggcaggtggtgtctggtgtggaactacttcctggcctccagatggccatcttctcctcatagccttacaggatggagacagagcaagctctcctgtccctttatatgaggacaagaatcccatcatgaagggtctgccctcctgactagtcacctctcagaggtcacatttcctaagaccatcacaatggggcttaggatttcatcatttggctttggggtgggggagtggtacacaaacattcagtccataaaagggggactactagggtgaggcagggccgtgggcagagcgcaggcctggggcatgtgggctgggtaaggcagactttggaggtttccaccatgggagtgacaagggctggaacgtgggaagaatagggtggaggatggcttggctgggacacgcccaggggcagggagatcaggcagcagactctgcagggacgtgatggtggcctgagtcctggtccagatgctgctatccagagaacactgcagccagaagggaccttgacagtcactcgattcatgcttccatctcacaggtggagaaaccaaggccccatgaggcctgggacctggcattttcaggaaggccacccccaggaaggcttcttccccagccacttagctggccctctccccaacctttttctgcctgctcagtgagacaaatcaatgacacatgtctcttcctcttgttctgggccacgctgcctctacggcagggtgatgttgtggggccttgagcttggggctccccagagggcaagagcctgagacagcaggtcaataaaaggtgagtggtcgacgggattggcagatcctggactcagcccttcactgggcaaatgtcaggcccagtggctgggcagcttgggggcatttccacctgaatgcagggacaagaccaccggccagtggcatcagactggcaaggtgaggaggtggccttttgtaatggagtcacctgtgtccagaacagctgtcctccccttgggccatgggaggacaaaggagagagccagaggaaaccagagccgaatgccacattgacttcagagtgctctcctggtggctggtggggctgggtggggtagtgtgagagtgaagccagcggcctgcaaggtttgtcctctgcctagttcacttggcctggagcctgaactgggagggaggattccggtctggctgtaagacttactggctgtgagcccttggagaaaagggattcatcgtctggacctcaagtttctcatctgtgaaatggaatcgtctccatggctgagctgccttacattgcccctgggtcatgtttacgttcttacggatccagcctccctgccaggggttccctggtctctgctcggctactccctgggctggggctgatggcctctcaggcagacactctgatcatcatcatagcctgccggtgagtagtctgagctaggctgtcagtagagaagggtgggatccactttcttccactctgatctcttctccacagccctcagttattcctggaattagacaaagccctgaaaaaatgcgaagtaggggacgtggaagtatgatagctgcaactagcacctcctggctcacccctcccaccttcccaagatacaccgaagttatcaataatgctgaaggctagaaataagccagaagcaaggggagatgtttaactaattgaagcccaaagaaaggagtgaaacagaacaacaccgaagccactgtttgccctgccttccgtctggggaaaggaggaaagccgtgttcctactgtgtgagggctgcattctccttggcctccctcatccatatctcttaccatgtggtgacagctgtcctttgagatttaactcaagttgctgtgagcacgctatcctgcctccctgagggggttcagtgacctccatgggcatgtatgtgttccagggagctcatgttctcatggccccctccagtcagagtcccagcttcttctttttttttttttatttttttttgagacagggtcttgctcttgttcccaggctgaagtgcagtggcataatcatagatcactgcagcctccacttcccaggatcaagcaattctcccacctcagcctcccaagtagctgggaccaactgtgcccaggtttttttttttttttttttggtagataaggggtctctctatgttgcccaggctggtctcgaactcctggactctgatttcttctgtgggcccagctgtgtgccagctctgatcaggaaatatgggaagaggagacccaggcccatccatgaagatgagatggggggaggaagagaagcagaggaaaaatccagcctcattcttgggaggctgacttacccacagtcagggaacagcctaggctgggtgtgagctggaggctgcgagattgtgcaagagggatgggaggtcacaggggctggaacctgtggcaaaggatcccaggggaatcaaaggatggaaacgattgggtggtagaaaaaagggaaagaaactcattcccattgcttcacgctctgggaaggccatcacaatgctattcttagaaggaagcatatttaatgggaaagttaaatcccacacccatctaaacccttgacttctgcatttccaaatacagggcttggtgagttacctgaaactgtattaataacagctaatgcatacatagccttggtccctggtaggcataattctaatcctttcagatataccctataaatgtatataatccctatataaaaccatattgttacctgtgttttagggatgaagaaactgaagcacagagagctgaggtcatgggcccaaggtcacagctctaataataagcagtggatctaggagttgacccagcagtctgggtcaggagtccatgctcttaactactgtgctatggtgcccttctgtgggaagggccacgcagcgcctgcaggtccttagaaatacctctcttgttttcccagggcttgctatgagagtatcactcacccatcccccgcccctggtcctcctgctgaatttcagagcccatctagccatcaactacccgcgcctccactgctcttaccgggaggctgtttgtgaaggcagaattggaatttctgagtaaaattttctttctctttatttcagaaatatagttctctcaaactgagcaccagagctattgattcagcaataatagaaagtatttgtgtggagaaccatgcctccttgcacaatctgctaatgttctcgttggcaggtatatagaatattgacaaaggaaattcaagttgtcctgaatttcccccagcttctcaggaagaaggggaaattagttttgaacatggcataaataccatcacagttgtccccaaatattgattctttgcagtgtcttttattatatgcacataataggagctcaataggaattgactaaagccagattgcctggtgagaattctgtctgctgtgctctagctgtgtgaccttgggtgagtgacttccgttctctggctcacaattccctttgtaaagtggagctgacaatagtacctttcatggtacctacctctttggatcatggggaactacatgtatgaatctaggcccagtggttaaatcagcgcctggcccatcgtacaccctcagtcaaagactagctgctactgtgacaggcttcaagtggaagagtgaaagcaaaatatggcttggatggaagaggtcaccctggccaccctgctcctgatgattggcaccagaagtgactttgatcttttacagatatttgcactgttgatgaaaatctagcaagagttggcaaattaatactgtatacaaaaatagagaattttgcaagtaactttagagaacatctagcttaattcccctcattttagatgtgcaaagtgaggcccagagaggggaagggcttgctcaggcttctacagttggtccctgtcagagctgggacttaagtccctctagggaagaggctacgctgcttctccaggttcatttctttatccatggctgtgaccaaataaaagattcaaaggtcagagaatcaacatactgcctttgggaaaagaaatcacagctcaagttggcacgtttggcgctgagtcaccagcatacactgctagggagggacagcagccatcagtttaataacctctaagccatgtgactagttaaccagggaattcttttttttttttaattattattttttgagatggaatttcattctcattgcccaggctggagtgcaatggcgcaatcttggctcactgcaacctctgcctcccaggttcaaatgattttcctgcctcaacctcctgagtgggactacaggcatgcgccaccatgcctggctaattttgtatttttagtagagacagggtttctccatgttagtcaggctggtctcgaactcccgacctctggtgatgcgtccacctcggcctcccaaagtgctgggattacaggcgtgagccaccacacccagccaaccaggggattctttctgagaagttctcaccatgattttcttcctggtcattgatgactgatcccatgggtaatatgtgtttctaatcattagaaccatggtgatgacattgcaggaaccagagatgcttttctacccagttctcagggaggatgcatgacaccctgagaaatatgatttgtatcttagctagttagtggtagatttaaaaccagaacccagaactgctaacttcccaactaggaatctaactacaacaaaagagtacctctctaagcaagccttctgccagtgattttctgcattgcagtgtttttactttttattttttgagacagaatcttgctcgtcactcaggctggagtgcagtgatgcgatcttggctcactgcaacctccgcctcacaggttcaagtgattctcatgcttcaggcacccaaatatctgggactagaggcatgaaccaccatgcctgactaatttttatatttttagtggagatggggttttaccatgttggccaggctggtcttgaactcctggcctcaagtgatccacctacctcggcctcccaaagtgttgggattacaggtttgagctactgtacctggccagtgttttgtaaaatatttcagaaaatcccccaactctggcccttataaagacaaaccccatagatacagggaagaggatttgatgcccatgtagatttgaggctgtagatatagatagagaggcaagagattactcccccagagaaagctaggttaagctgttggtcatctttgacttgtgaccggctctgagattacagaagttctaacctaggactactcaaaagaggatgatcctagatgctgccaacttgtgaaattttggccactagccttcaagaagtacagaaattgagagtaagtgtttagaaacttttatggcaagtgatagagtagttttgtgtttgctgaatctaataagtacaatgtgaacatacattttgtagatctttatggtttgtttcatttttttctgaagatctgtttttgttgtatttctcagaaatattcatccaccattgattgacagtaatgaaagaaaattctggcccttcaccttaggtgaggtttgagaagctctgccgtctaggtctcttctccagagattctgaggcagtcggtcaaggatgcaggctgagcacctgctggggtcagggctatccaggtgattccactgtgcagccaggattgagaaattctgccatcccagatcagcagcagcggcatcacccgggaacatgctagaaatgcaaactctagggcctacctcagagtcactgaatcagaagttctgggggtgggggagcagcaatctgtgttttaaaagtcctcaagtttattctaatgcaagctggcatttgagaactattgccctggactaagttcctgtctcccagcattgctgtgggtctggcctgacaggcagagatgtgcacatactgatccagtgaacatctagaactgaagcacaaacatgccctccagctgcccagaacctttctcctccctatacaagtgtgccacccaagattcagcctgaagagcagggcggaaatctcttcatatccctgaagacgatctctttcttctttcttctctctgatgagaaatccagcattacctattttttacttattcataactcactcattcatttactgaatcatttgttgaaccaaatatttttgagttctctctgcatgcaggtgtgatgtgggtctgggatacagagttgaaggaaagatgtaggtagaaaggataggtgcagggagtaaggggatttacctgacacctgactagtcctggttctggccctgcttcctatgagtaagtcacggccgtgttcttatctataaaatgggtgaagtttggactagatgaatccttagggtccttccatctgtagtgacctgggcctccaaaggagggctagtggctgaggcacagcactaggcccatagcaagtaggcacatagcaagttctcaatcatcattggaggagtcaatggatggatgggtgccaaaatggttggatgttatgaggacgagcataaagtctttctgggggcagaataagtcatgtgtgtgtgtgtgtgtgtttgtgtgtgtgtttgtgcgctcctgagccgtgagcaatggtgacccatcaagtcctgcatccctgctgtcctggtcctggctacctagcttcacaggcagagcaacccaagcaatcagagcatgggggcggctaggggcagggcaaactctccaaggttgcccaatcccatttcctgtctgagccagaggctccctatgcagctccccagcagcaaagcaccctgcttaggcttgtacaggtcctcctcatcagctactcagctcccaccagcattttgttggggggatggttctcctccaggctgccttccctaactgcgccagccctcggtaatctcccagccctgtgctcctatagcccccgaagtcttgctctccagcccttgctctctccccagcctggactcttctcagctgcccccactatcttggaagctccatggacactcataaatacttacttcaagaattatttttaataacataagaaatacataaatacattatcattattaaaaaatagaaataagacaaatgtcccccttggccctcccaataccatctgcctcccctgagaagacttcttatcagtttcctgagtttctttccacacttaaaattttgcatttacatttgaatttttgtatttccattttttgtgagggtgtttacacaaatatactttatggatgctcttttcactccgcaatgtgtcttagagaactttccaagccagtagttttgtgctgtatatcacatgtgtgtcatctatatgttacctatgttatggcataaatatggcataaaataccatttatgttaacagctgccttttgtaccagagcaaggatacatgcccttattagtggaggtgtggtacattttcagtttcacagtgatgaactctgctgcagagaacatttttcatgtgcccccttgtgtaacatatgtaaatatttctccaagttgtaaactcagaagtggaattgctgaattggaggctatgcacactttgtatttcaataatgctgctaaaccacccttcaaattgcttgcctcccagcacctgaggcccccaatatgtcccaccccagtctataacaaccctcaatcttcattttgccaatctgataagcaggaaggtgaatctcattcttgctttaattggcatgtctctgcttactcatgaggtagagcatattttcatattggccgttggtagaggaactgcttgtggaataaattaggtgcttagtaaagacactggtaagggaggagaagagtggtgtggctctgggcaggttgtctgtgaggttccagatcactgacctagtccaggagggatgttcatgggagcaggctggggtgcaggtgaggaagacatttctgacacatagaatgacagagtggcacagccagagaccaggctggggccctcacctcacctcctaactggatgtccctcactatcagaactgtcactgtctgaactcaggagcccaatagatgtgcatagtgaggattatagtgtttttgactacaacttgcttcaattatttattgccgcataacaaactaccccaagatgtagtggtaaaaaaaaaataagatatttgctcatgtttctgcaatttgaggagggctcaatgggggcagctcagctgtcaacgtgttaccgaatgtcaggggttcagcctaggttgcttgctgcgcagaaagccaatcactgagacaccaagtattgccaggaaagaaaggctttattatgggtgacatccaccagaagatgggagacaagtctcaaatctgactttctcgctgaccaaagttaggagtttgtagagcagggaaggaagaggagctagtgaacaggcaacagatggtcagacgagaggtctggcctctcattgtctggataaggtgatctggaatgtatcagtttcttgatcctgtctgggaggcctgatggtcgatttcctgagaaaggaactcataagacaaatgtaagtttctcaagcttcagttctatgggaaaattgggccagtttcaaatggacagttccatgagttgtctgctggggttggaacattcaagaagggttcttcatttactgtctggaaactgggctgggatggctggactagccagggacaactctctctatgtggtctctccaagtgggttagctcaggcttcctcacagcatagtggtttcagggaagtgacactttttacatggcagctggctcctccaagagtgcaaaagtggaagctgccaggtcttcttgatacctggaccaggaatgcccagaatgtcattgatgcttcattcattgcaaaccagcaacaggacgggtggaggggaaatagtttccacctctttagcagaggagtagcaagggccctttgtaaaagagcacgtgggccctaccccacatggaaacacacttgaaatcttttctaagcaaattgagaaaaaaaggagaatgcattataaggacatggggtgtctcaggtaaccccgggctggaaatgcagccgtggattgggaagagccatcagtaacccaggctgcacctccctcgcctccctgagggcaccctggtctccctcaggcgtcctcctcctctccctgtgaaccagctttctgtgctttttcatgtccatggactccataggtttccccagaacagcaccctgagccccccagttttcaagtttctgaatgtttttctgaatcccacttccaaaccccagattgacccagcctggtccagttgttctagatgaggaaagtgaggctgagagacttcaaaggtattgcccagcacagctaagcggcaaagctaggttctgaatgtgggtcctccatctcaccccagagtgaaggctcagtgcaggctgagcactcacagggccctgcccttcttcttcctgcagcccttgtcaagctcagatctgtgggggctgagcagagctgggtctgccaggccaggcctctgccttcttggcagcctcctttgtgccctgcttggagggggcagcatcctgccatgtggaagaggtgggtccattttgagtgtaactcttctagaggaagggcttcactcaccccaactgagtgccttcactctagctccagtgtgggctggaggttctgaggctcagtgcagaaaggggcaggcaggaaagctcacttctgcatctgctcagtgtaggccatccttcttgctgccacgctgatggaaaggctagctgcacctctctgggtctgcctgcctggctgggatgagattttccagggctgcctctgacctggcactctcccctacagtctgtgcaaaaacctagctcatggcactacagtcacctgtaccactttctaagctttctccctgaaacaagggttggcctgttttaagggacccctgtgctgcacatcatctgacgcttcctctttgcagggccttggcggatgtcagccatagcctggaatgtcccccacccccagctctacctaaggacaccctctaagactcaaggaaaaggccacctccttcatgatgcctctctaggtttctgagaactgtttccacttccatttggatgtctgcctcctttcaactttgattagggattttggacataggcagcaaggcctggaatatcctcacaatatatcatttattcattcaacaactatttattgaatgcctactctgcgcaggcactgctgtagcactgggaaacagaagagctataactcactgccctcatagatctgagattctgctatgggaagttgacaataaacaagatgactaagttaagtgcatggtgagtcacatcttggtaggtgccatggggataaagttaaggcaggaagggagattagagtgccagggatagggcagaatgggcaatttaaaaggggcgggggaagacctcactgagaaggggatatcagaacaaagacttgaaggaggtgagggagtgggtcatgaggccctctggaggatgagcctggtagggagcggctgccaagagcctgagcaggagcatgcctggcatgtttgaagcacagtgtggcaagagcagagaggaaaagagggagggagatggaaggcagggccagacaagacatgaagcaaggtcatgcagggccctgtgggccattgtaaggccattgactctaacactgaaggaaattgggttactgggcagtatctctgttatcttattattaataataaagaaaaggacacggtaagcaaccatgaaattaatagtaatttataataataattaatattatttttagttttctctatccaccaagcactgtgttaagcacttaatataaataatctaattctcacaaccacgctatgtgttggtactctcattatttctgctttgcaaatggagaaattgagactcagggagatatagcaactttcccaaggtagaacagctaggaaatcttggaataggaatttgaattcaggcagcctgactcctgaagccacaccctggatcatctcttatgctgccttgaattaatgaatagggattaattgaatccttcctagctgtcatactgggatgtttagtcccaagatgagacaatgtggtgcatgccatgactgtatcagaatcctgtagatgagtgcccatctattcatccatctgtagggaaaagaaagagagatcagattgttactgtgtctatgtagaaagggaagacataagaaactccattttgacttgtaccctgaacaattgctttgccctgagatgctgttaatctgtaactttgccccaacctctttgccaattttttcccaatcttttagatctgaagttccctgttctggaaaccatgggcagaattgttctattgtttgaaatagcataattagattttctgtagaagttttaactccccctcttcctgagagaattttaatgaagctgagataagaggcatatttactttcagtttgccccattgttaccctgggtacctccaagcacacaagcttaccacaaggctgaccatagacatactcgggaatctctccttggctgtcctcaatgctcacgttcttagcgtaccttcaccctagagaaaggcacccatgttgggcggcagatgaaggggtggcctgcccctccacacctgtgggtatatctcgtcaggtgggatgagagactgagaaaagaaatgagacacagagacaaagtatagagaaacaacagcgggtccaggagactggcactcagcataccaaggacctgcacgagtctctgagttccctcagtttttattgattattattttcactatctcagcaagaggaatgcagtaggaaagcagggcgataatagggagaaggtcagcaagaaaacatgtgagcaaaagaatctgtgtcataattaagttcaaggggaggtactatgcctggatgtgcacgtaggccagatttatgtttctctccacccaaacatctcagtggagtaaagaataacaaagcagcattgctgccaacatgtctcacctccctccatagggtggtttttctcctatctcagaattgaacaaatgtataatggggttttataccaagacattcagttcccaggggcaggcaggagacagtggccttcctctatctcaactgcaagaggctttcctcttttactaatccacctcagcacagaccctttacaggtgtcgggctgggggacggtcaggtctttctcatcccacgaggccatatttcagactatcacatggggagaaaccttggacaatacccggctttccagggcagagttccctgtggctttctgcagtgcactgtgcccctgatttatcaagacttgagaatggcgatgacttttatgaagcatactctttgtaaacattttgttaacaagtcacatcctgcacagctgtagatcccttaaaccttgattccacgcaacatatgtttttgtgagctcaaggttggggcaaagaggttggggcaaagttacagattaacagcatctcagggcaaagcaattgttcaaggtacaggtcaaaatggagcttcttatgtcttccctttcttcatagacacggtaacagtctgatctctctttctcttccctacaccatccatccatcatccatccatccatccatccatccgttcatccatcatccatccatccatcattcatgcatccattcatccatccatccatccatccatccatccatccatccatcattcatccatccatccattcatccatccatccatccatccatccatccatccatccatttactcttcctttcctccatttctccctccctccctccctctctgtatctattcatgcatcaactcacccaactatttagcattcattgaggtttcctatgtactcagaccatgctggaccaggggtcctcatctgttccctgttgttattttcttatcctgtaaaggagggaagaagaaactgaagaggaacttcagattccaccccagctctatcctacctagccctgtgacctctctgggcctcagcctctctgtcttcaggagggcttcgtcttgtagttttcagtccactctgatgtttcctggctatggggactgcttattcgcggcaggggagccctgcctgcgtgctgttcctgctacctggatgtggggtctcaggagaaccctggctgcatacgtgcctcagcctccttctggagaccaggtgggaggtctgcccttagtgtgggacaccatgagcttgcccttccttttgtgtgagctcagtgctgtaggaaccaggcctggtgtggtaagaaatttcatttccaccctctacctccatccctgcctggatagctcagccctgcccagagcctgtgtggctatggagctgctcacctaggcagaggtgagacctgggagggagtagggatggcctccagccaaagttgaggcctgcttactggggacaggatgatagagcccagctcactgccctgccctgcctttaaagtcctgctcacattttacctccttggagaagtctgatatgagacagttggaagggtaaggaaggattatgcatgcatgcacacacacgggcatgtatgcgtgtgtgcacacatacagagatatacagacagatgggacacacacaagcaaacacacccacacttcctcgggcagggcatacctgctcgctcagccagtgtctctgaatcaggccatgttgtttgtctttccttgcccatcccttctgcttgtccttcttctctgggctggtctgggttctgtcatctctcctctgctcgaaaacaatctcttaggcctctgggcatccattgtgataggcagaagaatggttcctgaagaggtccacatcctaatcccagaacctgtgaacattaggtcacatggcaaagggaaattaaggttcacatgcaattaagatttcagtcttagtctgtgtgtactgctgtaacaaaatacctgagactggataacttgtaaaggacagacatttatttcgtacagttctggaggttggaagtctaagatcaaggcacaggctggttcactgtctctgccagaagcccagtctctgcttctaagatggtgccttgttgctgtgtcctctggaggagacataccctgagtgctcccatggcagagaagcaaagggcttaagctagtttcctccagcccttttacaaggcacgaatctatgactgaatcactgtccaaaaggccccatctccctctcccaatatcaccaccatggggattaagctttaacacatgaatttttggagaagacacatttaaaccacagcagttactaatcagctgacttgagatggggtgattatcctggattatccagatggacccattgtaatcacaagaatacttacaagtagaagagggggcaggagaatgagaagcagagagacggcagtgtgggaaagacttggggcagtgttgctggctttgatgcaggaaggggccatgaggcaaggaatgcaagcagattctacaggctggaaaagccaaggaagcagtttgtcccctagaacctccagaaggattgcagccctgctgacaccttgattttagctccatcaaacccattttggacatctgattgttagagtggtgagagaatacatttgtgggtttaagccattaagttcatggtgatttgttacaacagcaatcagaaatgaatacattcatccatttagctggtctttctctcacttgacactctgacttgtgttacagtttcctgtgactggctgcagagacattattgtcctgttagttgacgacttgcaaaaccatacacaatggctctgactgactgtgggaccctggaaatgccccctttgctctcttgtcctcatccctccatctctgcagttggggctgggttaagggcccttcagcttcaacatcctgggtcttggggttttctataaactaggcatgagttccactagtatgttggaggaacggaaccgggagccaccagagtgacaggtcagcctggggtctgcctctccagtctcaagtgtaggaccaccctgtctcaaaacagcctcattcttggggaaacaccactccagggtcagaggccaccagggctgtttctctcctgcctcaaacaaactttcttgaggctggaagactgtctgctggatgtgagcctggatggtgctatcatctgaaaagtgggaaaacttgagggcttaataccatcatcagaaatccaccagaagactggaaaatgctctggacagttttcccttctgttgccatctacctccctgcagcagaggctgaagtagccacctacatctccctgggcccttcccttgttgtgctgtaaacatttgcaactctttgcctaaagacttatcctgacagccagagtctccaccccacaagcatgtcaggccaagggctggagatttaaaggtttctggagcagccttcaatctatgactggcaggcaatgatgtataactacctccactccctcgcccctcaggtgagataactggaaggcacgtgtcctacactggccctcagcattccctggcaggaggaagctctacttactcagagggacaacactatttattgtggggatatccaaaatataaccttggatccttgtttcaggatctgcttttggggaatccaaaccaagatatcacatttcctcactacttccccttcctctagtttctgctctgccacttacttgctgctggggagccctgagccagggtcctctgtggaatggggcttatgctatctatagcttgactgcctatattgccttccctggtgcttaccaccctaggggaagccccagtctggaattgaggtggttgcctgcactcctttggagctgagggcagggggtcctgtctcaaggccatgatggtatcagaggccagcattctctgcttgtgacctgctcagctttgggggcccagacctatcagtcactcacctctgaggtagtgaatgagctcatctgcccacttcagcctcctgggaaggacaagggaagcagaggggaaggagaaaatgggtgcaggtggaaataaacagtctggctttagtcctaggaccagacagggcagggaggactgagactctaagaagggtcgaggcctgtgtggctttgaacaggaagaacctcacccctcctagaagccaagaccatcaaccatggccccgatcctcttctttctgtttcagaacatcatttaagcccctctagctagacccattgccttcatctgaacccatcttttcatcctgcctcattttcaatctgttctcaactgaactctccccagatacattccatatttcccacctgtaggcttgggggcagccaggagtcctaagctgagggaagagtgcatacaaagatccaacaatgaggacaagcatggtgaatccagagaccactgggctgcggtgcttgacccgctgcattgagaagtttggaattataaaagcaatggggagccatggaaggctttatggtggggggaggagatggggctcagcttcttttccatcaacttgggtcagatccatcctttagggatggtggcaggctcaaatgctcacaagtaatttggaactttccacatttcttgtcctgacccctaaacgccagtagcactccattggcattttgataatggaaaatacctccctggagagggctatgccctcccaagttgaggaccactgatggggaacctcactggtaccctgggcagtggctggatgcatggagaggcaatgagggcaggggctggaggggtgggcaggacccagaaccggggcctgggaaccagggaaggggctacctcctgcctacccagtgcccctgagtcccagaacaaaagcagcagcctcatcagctcccttggggcagggttgagcacaggactttccctcttcccttcaagagctgctccctccaccccctgctcccctccctccgctgctcccctccctcccctgctgcttctactgagggcttaatactgggtgtcagaaggcaagttccagccgataggagaggaaagagtgcaaggacacccaaggacacctgaaaggctggcaacagtggtggttgccttcgggtgcctagggatcctttctgccttgtaaattttgttgcatgttcgtgtgtgacttaagttttatattatttaaaaaaaaagtaatttcaaatgtcagaagagttgcaagaaatgtacaaggaactcccatctacccttcactcagattcatcaattgttgccattttgccatctttgtgttatcatcattgccctgtgtatatgtataaatatatacacaacaatattcacagccatgcatacacatatatgtacattatgccttaaatacttcctacttctatgtgcatttcctaaaaacaaggacattcttttacataaccacagtacggtgatcacagtcaggaactagaaccctgacatagtactattagctaagccacatggtccatattcaggttttgccagtggtcccaataaagtcctttccagttgtgttttccctgtccaggatcccctccaggatcaggtgttgtgtttacgggtcctatttctttgttctcctttaattgggggtggttcctcagccttcccttgtctctcatgaccttgccactcttgttatttggtagggtgtccctccattcagaattgtctgatgtttcctcatgattagcttcagaaaacaagtggtgtttaaaagtaacgatgaggagttgttgaagcctaggagcctaagaaatggaggaagcctcacgtaagaggttttggaggctggcaagccaggttttgaagctcagttttgtcatgattcattcacccattcaggaacgatctattgaacatgtttgatgaatctggcactgctctggtgtcctagaatatatgagtgaacaaaaacaaaaacttcaccctgtagagtgtcatgggttgaaaagtgatgccccttccctgcagcctcacagtgggaccctgtttggatacagcgtctttgtagatgtaattaaggaacagatcttgagaccaacctggattactaggatgggtcctccttccaataatgagtgtccttatgagagacagaagacacagacacacagcggggaaggatgcatggagacgcaggcagaggttggaattaggctgtcacaagccatgggatgccaggagctgccagaacctggatcctcctctggagcttttggagggagcatggctctgtcggcaccttgattttggacttctggcctccgcgactgtgagagaataaatctctgctgtttaagcaccctggtctgtggtgctttgttacagcagtaccaggaaaccaatacctgcaggctgcattctagtgggtggtgtaggggcaggctacaccccagcaatgagcttcagcaaatttctttacttcaccaacttttcattgccttcgttaaaaatcaggataatggcacctgactcaagtggggattaatggataatgaaaagcaagtacctagaacataggaggtgctttataattgacagcagttactactgtagcctgccaatacctccaacaagaacctaaaagaaaggtttgcccaggcaatgctcttctggacaggtagctgcagagcaacttcgtctgatcagattccagctccctaggagccggcaggtggtacggaattctagagagttctgttcctttaagcagacacaaaggggataaatcggcctctgcagcctcctggctcagaacatctaaaccagcatgcttttatgcttccaggcaggccggggtctgccagagtccattgtctcctaaagggttgattaattgggagccggtaattggttttggctgcgggactggggaggtcacagcctctccgggatggagagctctatgtgtgaagacacacggggcaaggtggctggagcccagagctgtgagggaagaatgggacttcttccgtgtgtgtgtgtgtgtgtgtgtgcgtgtgtgtgtgtgtgtgtgtgtgtgtgtgtgtgtctgagggagagagagagagagattgagaattatgactcctctctgagcctctttcaggacaacatggggtgcagtgattttttttttgagactgagtcccactctgtcacccaggctggagtgcagtggcatgatctcggttcactgcaacctctgcctcccgggttcaagtgattctcctgcctcagcctcccgagtagctgggattacaggtgcgcgacaccacacctagctaattttgtgttttagtagagatggggtttctccatgttggccaggttggtctcaaactcctgacctcagatgatctccctgccttggcttcccaaagtgctgagattacaagtgtgagccaccgtgccctgccggggtgcagtgatgttcagcaagtgaggctgcaggccccagagtagttattctgccaccatcccctggagagcctgtaggggttgagaacttggaaacctcccccttggccttctaggccccaagagtttccctggcctctttcatgtaaaaggtgtcctagccatggtgtaggcggtgattgggccagtgccactgtcaccagcaggtgggggcagaggccacagggtcctgtttgaaggtgggggcctggaccccatagcttcttcaaggctcttctggggccaggactcctggtcccaccaaaatggccccatctcccggagaaaaaatggctgctgagtggcaagaaatgtgggacttcagatggtttgccagctacccagaagcaacagcctggtgtctgttgatattttaggttgcatgatgcaattccaccttaaatttgcatagccatttttttttcctgctgaagccctgtcacatcaatccattcaatgccagcacctcttcctgctgtgtagatcagcgaaaacctctttctgttcccctaaatggtaaactgaggctccacgaggtaaagggctttcccgtcaccactcagcaagtcagaggagcttgagaactactgagtgacccgtatagacagcccccgaccaccaacagaggtgtgcctcttagtgaaggatggggaccttgttacctgggaaattccctttgcctcatctgcatggacagcacttagggttcaaaggttgttgagcacacagcagggagagcctctgcagccagaagatagaagatgccacacagggcggcacctcagagcagcacatttgtataaccacacgacagtccacaggcatcttctgcaaagatcctggcagcttacactgatagcttgagtcatgcaaattgctagatttggtttccatttatttgcagatgaatatccctctggaggcaggaggagggaggagagcactgtctctttttagttattcggggcattattttcaaagccctctgagctgaggcctgggactaagggtgattttgattctccagtgagtcctgttctgactgctattcacaataacatgccctgtaaatcgtccaggacccaggctgatcctaaccacttcctcccacccctgactgctgcctcatccccccccttctctttgcaacccctgcctcttgcctcaagcaataaagcattaggaagtactgctgcacacagtcctaggtgtaggtcagtggggggccaggggtcagcaggcagatgccatgcagaggagcaggatcccctgggggagcagcttccacacttgccgcctttagccagccttgaaggataagtcagatcaggtcactcctctgctcaagtgccttcaatggctcccacctcactcacagcaagaaccatgggccttacagtggcccacaaggctctccacacccatgaactcctgccaccctctccctctttcactctccttccatggcaccaacctccttgctgttcctggaacttgccgggtgctctcccatctcagggcctgtgccccagctgctccctccgcccagaaggcaccatagcattgcccttgcagaatgaaagctgtcttgcctaagagattcctctaccttcccccttctgtcagaggtgtgtgaaccagagcaactccatcttgaataggagctcggtaaaatgaggctgaaacctactgggctgcattcccagatggttaaggcattctaagtcataggatgagacaggaggttggctcaagatacaggtcataaagatcttgctgataaaacaggttgcagtaaagaagccggctaaaaccctctaaaaccaagatggccaagagagtgacccctggtcgtcctcattgctacactcccaccagcgccatgacagtttatgaatgttatgacaatgtcaggaagttaccctatatggtctaaaaatgggaggcatgaatgatccaccccttgtttagcatatcatcaagaaataaccataaaaatgagcaaccagcagccctcagttcttctctgtctatggaatagtcattcttttatttttttcctttcttaaaaaacttgcttttactttactttatggacttgccctgaattcttgcttgcatcagatccaagaaccctcttttggatctggatcagggtctggattgggacccctttcctgtaacacttccacctctgggcagctcacaaccacgggctcacagactcagggttgcacaggcttcaagtggggactgagtgcatgcaatccatgtcctggggctccccgtgggaccagaatgaaactgactccagtccctgctctgctgccccctgttctgccctgcttcctcgcttcctcacttccctccatacatcacgtgcccagatcctcatctcaggctctgcttctagggaactggatgcaagactcgcattatttaaaattgcaaaccgtatctctcaactgcatccccttcactccctgctttatttttcctaacttatcatcttctaatacataccttcagttatttcttggttttcttcttttgccctgtgtagcaggtaaagccttagttagaaggcaggaattttgtctgttttgttgcctttgttcacagtctgcaaacagtagctgctcaataaatagttattgcatgaatgtatgcatggattaagtattgctatagctgtgagtgcagtgggtacctaagggctgggctcagggagtactcctgggatggacaggatggggactggtattgaagtactggtggggaccagctacaggaggaggaagaggagggaagtctggggagggcagaagagtgggactgcaagcagggcattcggggttcagggggacgccatggagggcaggcgatggaagagctgcaagggtgtgctagacctttaggctctgtcctgcagcaaagtcccttatgctaaaagcacaggccgggcccagtggcacaagtctctaatcccagcactttgagaggcagagacaggcggatcacttgaagtcaggagtttgagaccagcctggctaacatggcgaaaccccgattctactttaaaaatgcaaaaattagccaggtgtggtggcatgcacctgtagtcccagccactcaggaggctgaggctgcagtgagccgagatcatatcactgccctccagcctgggcaacagagagagaccttgtctcaaaaattaaaaaataaaaccacaggatgcctttctgaaaggtcacctctcctaatcatggcagcagcagaggggagttcctagaagtgggaggaaattttcctagcaccatgccagcaccatgtctgccagcaccatgtctgcccccgaggtctttcctcagaccaaggacaatcctaggaatgagaggcagttcttgctgagatccctgcaggctagggcccagaacacacttttccccatagcccctcatctaatccttacccaacctaagggggtgctcttaggatcacccagtttatacatgcagaaactgaaagctcagccatgatgcctgcacaccagagccaggattcaagcccagttctgtctgtctgtctgtctgtctgtccatggggttacgcaaactctgggagcacctctctggttccttcaccctggtgcacagagcccacctggttactgagcacatgaaccaactgcactcacccatccacccaccctgctttgcagctgggcacagctaggatggaaactcagcctgcgccttgcttactgtgtggccctaggcagattccttaacctttctgagcctcagctttcacatctgtaaaatagggatagttgtaatcactcagcaggcactgtgctaggcattggggatacagcatcaaacatagacagtctctgcccttgtgtacttattagacaaactagacaaactcttccaaataattaaatgccaaacaagagcataaaatacagcacctcacagccttgttttatggatcgcatggcttaggaaaggtgtatgtctatctcagcagagggacctcagtgcgggtgaggtgacttctcctctgcaaacctgcccctggaaatagagtggagctgagaagcaagcaaaggaaggagcaggacccagaagaagcgaatagtagggccaggaggaactgctggggacagccgagctgaaaatggctaaaatcctgcctccaacttggcactttgtttctgactaagcctgggctttttctagcttcctgcctcttttgcttctttggtgtgactggggaaattgaggcgaggaaagtagtcgggacttgctgacaacatagctgcagccctcggtacctggccctcctgccaacatttgcacagccatggtggcaccacactgctgatgctcgtccacctctcctgcccaaagccttgagatgaaagcctttcttgtgcaagaggggctgagatggagaggagaagcagggctgagaggtctgcaatccttggaggagatcctgggcaacatcttcctgcaaccacttaacccatggagggcatgtgagctcacccaaggccacacagctgatgagagatgtggctgggtctagaatccaggtgtcccaactgcaggccaagactctgctgcacatggtaaccaccaagcttcaaacccgcgggctgctccctccctctctgagcctcagtcttcccatccatgaattgggcagctgactccctggtcctcaagtttctgtctgcatggggacccctccccctttttgccagctgttgggaagttgaggcagtgggcaggctccactctgggtgccctccctccccacgactttggggttcccagcacacctttctactgtcattcccccacggcaaggcaggagcgaggggcttatctggctgtctgaaagccgaatggctggcctctctgactgggttttcagaagctttctgcctttgctgccgcggtagaaaagatgacttcctttgcagtactgaaggaaaagcaagcagttatgccttttgcggtctaaaatgggcataggaccccaggggagaggcggagcaggtattttgctggctagcagaatggacagctgacactgttcttgggatctggaagttatcattacaaagaaaaaaacacattgctttcttctcaatgcgtcgggtagtcagtttgcagtctaacagcgggaaatggatggcttgcttaattacaggatgtgtgctcgctctgtctacagccacgtggcccgtcggtcacagccatgctgaactcttcagcagatggtcagcatctgccaccctaggtattttgagggggtgtcctctccacccaggcacgctcccgtcctgccttcctgatgctgctcacatcttgcctgcccactcaagctcaggcctactgctgccacctccatgagaaagtcttccatcgaggagttcagtgcacactatgtcccccactgcaagaccccaattgcagtggttaaaaaaaatcgatatatatttatttaaaaaaaatcatccaccttcccaagaacatgctccacccttctccaaaaacacagaaagtcatctccgcctctttcccagtgaaggaacaccaggagccctggcaggggaggctctgctaactctgaccccatgcacttcttttttttctttttctttctttctttctttctttctttctttctttctttctttctttctttctttctttctttctttctttctctctctctctttccttccttccttccttccttccttcctctttccttctttccttttctttcttttgagacagatagagagtcttgctctgtcatccaggctggagtgcggtggcacaatctcagctcacggctcactgcaacctccgcctccagggttcgagtgattctcctgcctcagcctcctgagtaggtgggactataggcatgtgccacacctggctatttttttttatttattttattttatttttattttgagtagagacggggtttcgccatgttgcccaggctgatcttgaactcctgtcctcaggtgatccactcacctcggcctcccacagtgctgggtggcccatgtacttctccagctcttgtcactgtagctcatctcaccagctgccctgccttcctaaagctgtgcacgccactcctgcccacgtcccgccacctttgatcacagaagtgcctatgccaggacatcagttcctccccactgccgccttttccagcccccagctccttggctgtcaccgctctgcctgtggaagcccgtccccagcccacacgggcctctacaggagccctcaaggacgctccgagtggctgtgctcctccggtctctcctggtgcttctcctggctgtgcctcctgccagaggcaaccagccacacccaggccacgttgccaccctctgcacaggtgtcgagctcctcaggcctaaaaggaggaccagaagtgatctcctgtagaccagcgtctcactgggtgctgggctgtgggagccctgcttcaccatcccagcaggagcccactcagcctctgcttgcacaccccatagtagtggggaactcactccctttacatgctctgctggctccccaggcagccctgccacgtggggcaactctgttgtccttccttgtgctcagccctcatcaccctgccttgagagacctcccgacccctcagatatcccaactttggtttctgttgggaggtggttcccatctgctgggagagcaagctgggcaggaggtcatggccttcccggctgcactaggcaggggttctgggcgcatcttcaccacccctgtccttcgctcagaccctccaacagtgcatgtggtctgggccatagggagcctggggcctccctgactgcccctgttgactgtgcccactgagccggggtgcaggacccacctagcaccatccaggggcccagtggcctcgcagcctggccagatctgggagaatctgtttggctttgaacacctctgtcttctggaggtctttagaacactcagcttcagtgaacatgcatgttggattcttggactctggaaatattcatgcagtatttgaccctcccagtctggattccaaattcagtcattcccagagcatacactcttctccggtttttggcaagtgggctggggagcaggtgccaggctccatctcgcacatgctgtgtgcatccccagggaagtcagtggctgctgtgacgagggcagtcatgaagcaggatcccacaccgcctgcacgatgctgcccaccacaggacagttcacctgccagcctatccatgcccgccacccgctggcccatccatgcccatcagaggacggctcgcccgccggcccatccagtccactccactggctggctctgccacctctcatgtccctgattccgctcctgttatgccccatgaagcctgtgccccagctggtctcctcaccctcataccccaggcacttgccctccttccttgtggtcatgcttttctggaaacctccaatgctcaccttgccttccttcttcagggtcaagctctgtgccctccccttgcctccagatgggctccccacaccccactgaccttctcagggatccctcagggatccgctgacctcttgggggctccccagtccccctgacctcctcggggcttcctctagcccaccttccagccccgctctgatggagccagtgtgatcacaagattccccccccagggtgggggctcctcctctgagctcactgaatgtgtgccggatttaggggaaaagcctcacaccgacagctaacactgcatagcgcttaccttgggccaggcctggtgctgcatgcttcatatgaactcatttcatctcccccattacccttgttttgcatgtgactaaatagaggctaagagaggttaggtaacttgcccaggatcagagctgagcatcagggtcagggttgaaacccaggcagggatgtctttgacattgcgtctccactgtcccctgtgctctagcgatgggaaggacaggtggcggggtctccaggggccctttctggagcaggagcactgaggtcagtgagcatttgctggacaatggctgagagagacgctcactggtgcagcattttgtgtaaacacccccagtgacacaagcagggcctgctcctccctctcctagctccctctgctgcctcaactcctgggcctatcaagaccttaacgctcacggccctctggcccagggggatgccggcagaatgcaagctctcctgctgcagcttccctgagagcagaacctgagaccagagcttggggagagatgatggtttgggggttgcccccaggaggcaaggaagcaggaatgagggagcagggagagcgagacaggcagggaggaagagctagcaccagcagccaggtttgtgtatcctgttcttgtttcatgcattaaacatcttctatctcccagagcacactgatgatcctttacagaaagttttctcctccctgcacaatctgtttcttccaggttgcctttgtcttgtttcaggccaggagtttgaggccagcctgggcaacattgtgagacccccaactctaccaaaaaaaaaaaaaaggaaaaagaaagaaaaagaaaattatctgggtgtggtggtgcgtgtctgtggtctcagctactcaggaggctgaggcaggaggattgtttgagcccaggagttcaaggttacagtaagctatgatggtgccactgcacttcagcctgggtgacagagcgagacactgtctctcttaaaaaaacaaaaacaaaaccaaaaacaagcaaacaaacaaaacccaaagaatttgatcagcccaggagaaatgatctgagaaatcgacatcagggctctagggccagactggacccccagtgagtactgagcttctaatctccgtagtgccccactgcaaatatgagcaggcagctgaggatcgccatacacgtgatgaaagtccaatagcagagaaaacgagtttgagaacagcctgggccacgtgcagtggttcatgcctgtaatcccagtgcttcagcctcccaaagtgctgggattacaggcatgaaccactgcacctggcctagtgctggttatattatctagaaaagacttttctggtctcctgtgtaaggataggacacctagagtccaccagagagtagagtgagagggaagaaggctggggcaccggatgatgttgatatccagcatataaatcttcagctaatcctcttatgtcaagaacagtgcttccagcgtcaactgtgtctggtggcccttggcgaagacaccctttgttttgccttccctaaggaacaggattttggtcctgggtgtggtggggcaaggagcaccagctgctatgggctgacaggcagggcatgagaacttcttcctacaaagcattcaacagtccacctgctgggagcccaccttcagcccaccctcaccctttccagaagtagccagtccattctcgcaaccttcctagaggaagtcaagttgcttaccaacttccaccatggcaagcttacgatgcagcttgccctggcctggtaagttaaggtacctgctcatcaacctgctccccagcttccaacattgtgttgctgttgtctcctctcccacttgtcattaccagtttattgcttttaaatactctacttattgtccatttagtggggttttaggaaggacgaggctcaaatgtgctcaatctgctgtccttatctgaaaaagctatctgtatttcagttatttttgtgtagtgacaactcacctcaaaatagaggcttagtacatttatgatttctcaggatgctgtgggttggctgggccatgctgcggtcaggacagcacagcggtcagggctggttgggctactctctgcactcagctggcatcttggctggggctgggggtctgcaatgccctcattcacatgtctggcagtgacttgatgttggctggggcaatggcatggcacagccctcagtgtccagcaggccagtctgggctttcccacatgctgggtgatatggtttggctgtgtccccacccaaatctcgtcttgaattgtggttttcataatccccacaggtcgtgggagggactggtgggaggtatttgaatcatgggagcagctaccctcatgctgttcttgtgatactgagttctcacaagatctgatggttttataaggggcttttcccccttttgctcagcacttcgccttgctgccatcatgtgaagaaggacgtgtttacttcccctcctgccatgattgtaagtttcctgaggcctccctagccatactgaactgtgagtcaattaaacttcttttctttataaattacccattctcaggtatgtctttattagcagcgtgagaatggactaatacgctgagggccacagggttcctaagagccgcaaggaagggaacaagtcccactgtgaaagcgcttattttttaatagactttgttttttagagcagttttaggttcacagcaacactgagtggaaagttcagagattcctcatatgttccctgtccccacccccaactattcacatcccccaccagagtggtacatttgttataatcaattaacctatgttgacacatcattatgacccaaactccattgtctacactagggtccactcttggtgttgttcattctatgggtttggacaaatgtataatgtcacatatccaccattgtggtgtcatataggatagtttcactaacctaaaaataaaaatcctctgtgctccacctgatcattcctccttcccccaaacccctggtaactactaatcttttactgtctccatagttctaccttttccagaatgtcatatagttggaatcatagagtaagcagccttttcagatcaacttctttcaattaagaaagtttgtttcctctgtgtcttttcatggcttgatagctcatcgtttttttaagtcctgaaaaataacccattgtctggatgcactatagttatgcatttatctgggcagtcccagatatcctggttgcttccaggttgtatcaattcataaatacagatgctatagacatttgtgcatgaatttttgtgtggacatgagttttcaacttctttgggtaaataccaagaaggaagagaggggacaagctccagtgtgtaagcacttttcaaacctctgcttgcatcacttttgctaatggccaaaacaagtcatgtggtcaagtccagattaggaacagggagatggtggagagaaatagctctacctcctaatggaagaagaggcaaagtcatattgcaaagacttgtgcccactggaaagggaagaatctgtggtcgtttttgcaatcgatcccattctggtacatgcttgctttttgaagtcttgatgttctgcttaaagcatcaagttgttacatcatggcccatttgcgatataaagaataaaacaaagctattggactagatggcttcagaaactgcttagttcaaaaggtgaagtttgcagcagcagaagtctataataagtttcacatattcaatttatttattcaacatgtaccatgtgctaggcactagacacaaccacaaacaagggagagcagtttcctgcctcagaatttctatgtcactgagagacagaaaatagaataacatgtgagatgaaggaaataaatgggtgatgtgatagtgaatggagaaagagagggggaaacatctactctatgtggtaagagtagggataggtaccttttgagctgagatgtggaatatgaggagggagccaggaatggaggctgctaaaaaggacctcccttctcttctgctttctctttcccttcttgtttcctgtcatcatctctctatttctagatcagtgcttctcagactttaatgtatgtatgaatcacctggagagcttgttaaaatgcagatcagattcagcaggtctgggctgggacccgagatgctgcatttctaataagttccctggtgatgctgctgctgctgctccttggaccaccctttacacagcaagaacctggaggtggggtaggtgctgaggcgagataatagaaccagaatcagggcagtggcggggcgatgagggccactaggtggatttgagagctgtttaggaggtaatgtcaaggcctggggaagctggtggtgcagaccaacggtgacagaggaagaggctagggtggcagtcatgtgtctggcatggataagggttgcacaggagtgtccttgctgggctggggagaggggaggagaagcaaggctgggggaccaggagatgggcagtgtgcctttggacctgctcagtttgagggtcctcgggctaggccagtagaggcagctggatactgtagtggtggggagaggacagcaagtaggtctgaaatacagagctgctctatagatgaacttctagaaggagtgagtgattcttggatgctcccaatgacatatcaatagaggcagcacagatggctccgtcatggttcagaagaccttttcgaatcattcaggagcctaggccctgaaggatctaggacatcagggatcatcggtctacactcagacaccttatcatacagtcctgctttactaacagtgtgaagcctgggctgggggtaggtggaaaggaagtactttgtgctctgttcccttggtacccagaatgggtcttggatcagcaacatcagcatccctagggacatttcagaaatgcaaattatttgcccccctcagatctgcagattcagaatctgcattttgacagactcccaagtaattcgtgagctcagtacagtttgagaagcaccagcccaggccagcagttctcaatcttccatacatttgaatcaccaggggagctttacaaggtgctgatgcctgggtggcatctccaagaatttctgatctaattggtctggggtaaggccaaggattcaggacttttacagctgcctaggtaagtctaatgcatatccagggtgaaaacccctgccctggcaccacccaacctttgactgactacagctggcgatattgaaggtgaatgacattgtagaagtaactttgcatctttgggcctcaagttggaaacctgcaacccctctaactacccccatccccattcccatgtgcctggtgggagcctggaggagggcaggcaatgtgggagggttctgggcagtcctagaaaactcagccgtaaagagccagctggttcttcacacaagcagctgcaagcccccccaccaggcccctactgcctgccaggccaagacagggaactgccaaggtgaagaatctgagagggcatccttagtccttgccctgggaagttctagctggcagggaagaccttcaaagaccaaagggaagaaagcccaccacgccagggtaagagaaggagtggggatattttctgggtagagtgcccaggtaggtcttcctccctctctcacctggagagaaaagctggagaaattaggtgccaactctaggatgtgcccaggaacctcattatttcagggaaaattcagattttaagatgcattcctttctattattccttgctactcaaagcgtggtccctggaccagcaatgtcagcgtcacttgggagcttgttgggaatacagaatctcagccctactggctcagatgtaccggatcagaattcaaagtttagcaagatctccaggtgatgcacaggcacattagtttggaaaaccttgcctcctggtccccagctgaaatacagtgtccaggaccacgagccaggtgggtccaagcttcttagcggccctgcctgtcgaaagggttccaggttcctcccggtgggccggctcatggttcctctgcctggttaggcctggcagaacctccatgaatcaaaaggtggcaggaaatggacctttctctcccaaggaggatccacacagaatctcctttccagcctccgcctgctgcttcctgccctgcactgccctctggtggccatggaagccattgccacctggcattgcccccgtctccagcagatccaggacccagggatgaaagtctgttgcttatggtggatggacgaagactcgtcattgtcctctgatataaggctcagggaccccaaaaacatgatggaggcagtttgaaaagcactgagcttcagcagcaggatggcaaatgtgcctggggtgctggctcaacccttctccccatcacagctctttcctgtaccacttgctggagtctgttcagaggtggggcatgggctagagaggaggggaggagttctgtgttgcaaggacttgcaggtaggaggttgctggactggttccgggagccctcttggtgtgtaccggccctgaggcagcagccagggtgtgcagggcctcatgcactgttgctgggctgggcccttatccccgcggggcatggtgtaaagcaggatacagcctggcctgcaccggctttggaaggtttctctggggagaacggactggggttggggacactgggagttgaaagacctgtgaggggtcatgccacattttggaaagtagttgggggcttcatgtaggcctggcctggttggagaaatgctgatgcccttcctacatcccagggaaaatgaggaaacccagtgctaagagctggctggaactgagctggctgtttgagtaagaagagatgtacgaccttgtgaaggtccttctagggacgtggccccaggccttcccagaggtcagaggccccaggttctcgaccatatggatggacagcctgagtcccggctctgccctgctggtcagcctcagccgaccatttcctgaggctccatcaccaccagatccgtcgtaacctggacagagcccaggctccaatgctgcccctgccactgaccacttagcactctgggtggggccagtcccctcccctcccagacctcggcttccccacctgcaggaacaggagcttggcctagaggtcttctagctctcacaggtgcctttccactttaagaacctgagatc

SEQ ID NO: 767 - DNA, 2880 bp, Homo sapiens
cctagtcgcggggagtctgagaaagcgcgcctgtttcgcgaccatcacgcacctcccctccgcttgtggccatgtaccgctacctgggcccggggacagcccgccgccgccccgcagccggggctggcattggccgcccggcgccactacagcgaggcggtggccgaccgcgaggacgaccccaacttcttcaagatggtggagggcttcttcgatcgcggcgccagcatcgtggaggacaagctggtggaggacctgaggacccgggagagcgaggagcagaagcggaaccgggtgcgcggcatcctgcggatcatcaagccctgcaaccatgtgctgagtctctccttccccagcacagccagcaccgcacgccctgcaagggaggtatccgttacagcactgatgtgagtgtagatgaagtaaaagctttggcttctctgatgacatacaagtgtgcagtggttgatgtgccgtttgggggtgctaaagctggtgttaagatcaatcccaagaactatactgataatgaattggaaaagatcacaaggaggttcaccatggagctagcaaaaaagggctttattggtcctggcattgatgtgcctgctccagacatgagcacaggtgagcgggagatgtcctggatcgctgatacctatgccagcaccatagggcactatgatattaatgcacacgcctgtgttactggtaaacccatcagccaagggggaatccatggacgcatctctgctactggccgtggtgtcttccatgggattgaaaatttcatcaatgaagcttcttacatgagcattttaggaatgacaccagggtttggagataaaacatttgttgttcagggatttggtaatgtgggcctacactctatgagatatttacatcgttttggtgctaaatgtattgctgttggtgagtctgatgggagtatatggaatccagatggtattgacccaaaggaactggaagacttcaaattgcaacatgggtccattctgggcttccccaaggcaaagccctatgaaggaagcatcttggaggccgactgtgacatactgatcccagctgccagtgagaagcagttgaccaaatccaacgcacccagagtcaaagccaagatcattgctgaaggtgccaatgggccaacaactccagaagctgacaagatcttcctggagagaaacattatggttattccagatctctacttgaatgctggaggagtgacagtatcttactttgagtggctgaagaatctaaatcatgtcagctatggccgtttgaccttcaaatatgaaagggattctaactaccacttgctcatgtctgttcaagagagtttagaaagaaaatttggaaagcatggtggaactattcccattgtacccacggcagagttccaagacaggatatcgggtgcatctgagaaagacatcgtgcactctggcttggcatacacagtggagcgttctgccaggcaaattatgcgcacagccatgaagtataacctgggattggacctgagaacagctgcctatgttaatgccattgagaaagtcttcaaagtgtacaatgaagctggtgtgaccttcacatagatggatcatggctgacttcctcactatcctcttcacatgtaacttctgcagacctatcacaagtttacatgtaaccacagaaatccctttctctcctgactcattaataatggataccattctcaacaagtcaatccaagtcagcccgttaaggagaaagaaattaaggttagcggatcatgtacaagctgagtgtgaaagtagaaatcacctacaccagagagccattttggtattttgcctttaaataaaaagcctcctttatctggctgtgcagccttgctctgtggcttttcccaacacaatcagtgctagtgctggggaggaacagtcaagagcagtcagttgcttgcttattttttctggatgagtctgggacacactgtaactttaacacatttaagaagtaggtgtgtggccttttcagaaggtggcatggtcctcaagtgagttcttagtattttatatcagcaaaataattcaattttgcaggttgcaaacaaatataaaacctgtttctgtttatgaatattattcttttagaatagaataagtacatgctgctgtaataaaattgcctttaatcacttaacaagcctaaccttgactcaaacagtgaatgcctatagaaataataaatgaaaagaactagtatttttatatcataaaacaatgtcatttatagcttatcattcatgtattgtccagcagacattaaaagccctgtggataattaagttatcttcatacctgcaaaatggtggaggctattttcattaaaactgtcagaatttgcttactataattatgatacagtccaaagaatgcagtcactttttatcatgttaactaattgttctcttttgaagatctatggttgactaattaaacaataattcaagtagagtgtcccagaaaaaaaccacttgggctccctgtttggagtctggctggctctgagcattgccaatggcccctactcacctgactttgtatcctctccttttagaggctttgcattctgcacccagcttcactaacagtgggctgaaaacatccttgggttgagtgtttcatttgggagttatttggccagggccttttgaacagtagtgtccccatgaagtgctagataatatatgtgtaagagtcagctttttttttttttttaactctaacacccttcagaaatttctaactactttgtaactgcatggcttaacctggtgataaaagcagttattaaaagtctacgttttcc

SEQ ID NO: 768 - DNA, 1650 bp, Homo sapiens
gcgagaaggcatgtgccggcagaccttcactggccacgagtctgacatcaatgccatttgcttctttccaaatggcaatgcatttgccactggctcagacgacgccacctgcaggctgtttgaccttcgtgctgaccaggagctcatgacttactcccatgacaacatcatctgcgggatcacctctgtctccttctccaagagcgggcgcctcctccttgctgggtacgacgacttcaactgcaacgtctgggatgcactcaaagccgaccgggcaggtgtcttggctgggcatgacaaccgcgtcagctgcctgggcgtgactgacgatggcatggctgtggcgacagggtcctgggatagcttcctcaagatctggaactaacgccagtagcatgtggatgccatggagactggaagaccattccaacttggacgcgttaccatgagagcatatcctatccaaccgtactaacgtggacaccctacacctcccctcagaacttcaaaagggcaagatcttttttccttcacttattgctgaaaccaagagcacaattcccattgagagaaagatctctgtgctgtaaactaaaacaaattgtgcattccttccggggccatcgtctttgttttcttttttgtcttgaatgaattttaaaaggaaatatataataaaaatgttaaccagaaggtaaacttgagtgtaattgtcagacagacacacttttccaccagtgtatttgaattttagaccagtgaccctgttttgtggcattcatgcaaaacatgctgagggctttgttcatctggtcatcgtgtccaaatttcagtcatgtttgtagcaagattttggaagcattcatatttcctttttaaaatgtattcctttgtgttcaacagttaatcaaaaccagagagtctagggcagcctctctgatgttgtcaatgatgtaaattcagtccctggtttttaattttctgtctgatgtcacagatcattgttgcacacaaacgtggcatagaaaagaacatgttcagaagccatggggccaagcacatgcggggacggtctcaaatgcgtgatcagagaatccttcacctttgctgaaaagtgagctcagatccagcaccatgttcctcctgacccatcctgtctatcttctcagttgagtttttaatctcactttgggtttccttgtgaagttggagggaagtttataatagcctaacactaccccacccccaactaggaggaacctctgttttcaagagagatgcctgtcctgtgcttggatagtcagtcaattatttgtgtatgaaacaatgtacaaatcaatgttttgaaaataatgatctcagactttctaagttaaattttaaaaattttgattgtttgccatattgggtgggtttactcttagaatcgcatgctgtagaaatgctcaaaagtgcatatgggactcagtccttaggtgttctttttcttttaagaaataacctcttacagttgtaaccattgcggctctgtccacttctcgttgctgctctgtggcacatatcggaagcagtacagcgcgcggctctacacgcttgggtagcgggataagtcactgttttctttatttctttaaaaaaaaaaaaaaaaaa

SEQ ID NO: 769 - DNA, 1985 bp, Homo sapiens
tttatagccttccagccttcccctttgctttgatcaactagctcatacaattcatgtaaggttgttttgtggcatgaatgtttggccatgccaagaaagacataggacacagtgggttactatgggattcctaggtagatttgaaacatgttaattgtattaaaccatagagaaaaaacgttacactgcagtggaaagtcctatgagtgttattgggcctcgtttaaacatcacatgaaaagctttttataatacttctatatttgctctgtctttaatcttctaatgttcaatgtacctgaaatcatgtatgtattcttggtttgtgtctttacttttgaatgctttcttctttgtcacatgtgcatagtaattattttaaaagctggcctatttgatatatatactaaaacatggaaagtgggcgtctttattttctcattcaaacttctaaacattgctttttatttttttgctaatatgcatattttcccattgaaataattttgcagtaaccagcatttaaatgcagtgcaaaatactgatgaagtaaaaaagcaaaaatctttcaataatggataaactgaaatcattctttctaaaaatgattaggaccttcgggagaaaaactgggaagcaatggaagcattggcatcaactgaaaaaatgctgcaggacaaagtgaacaagacttccaaggaaaggcagcaacaggtggaagctgttgagttggaggctaaagaagttctcaaaaaattatttccaaaggtgtctgtcccttctaatttgagttatggtgaatggttgcatggatttgaaaaaaaggcaaaagaatgtatggctggaacttcagggtcagaggaggttaaggttctagagcacaagttgaaagaagctgatgaaatgcacacattgttacagctagagtgtgaaaaatacaaatccgtccttgcagaaacagaaggaattttacagaagctacagagaagtgttgagcaagaagaaaataaatggaaagttaaggtcgatgaatcacacaagactattaaacagatgcagtcatcatttacatcttcagaacaagagctagagcgattaagaagcgaaaataaggatattgaaaatctgagaagagaacgagaacatttggaaatggaactaggaaaggcagagatggaacgatctacctatgttacagaagtcagagagttgaaggcacagttaaatgaaacactcacaaaacttagaactgaacaaaatgaaagacagaaggtagctggtgatttgcataaggctcaacagtcactggagcttatccagtcaaaaatagtaaaagctgctggagacactactgttattgaaaatagtgatgtttccccagaaacggagtcttctgagaaggagacaatgtctgtaagtctaaatcagactgtaacacagttacagcagttgcttcaggcggtaaaccaacagctcacaaaggagaaagagcactaccaggtgttagagtgaagtaattgggaaactgttcatttgaggataaaaaaggcattgtattatattttgccaaattaaagccttatttatgttttcaccctttctactttgtcagaaacactgaacagagttttgtcttttctaatccttgttagactactgatttaaagaaggaaaaaaaaaagccaactctgtagacaccttcagagtttagttttataataaaaactgtttgaataattagacctttacattcctgaagataaacatgtaatcttttatcttattttgctcaataaaattgttcagaagatcaaagtggtaaagacaatgtaaaatttaacattttaatactgatgttgtacactgttttacttaacattttgggaagtaactgcctctgacttcaactcaagaaaacacttttttgttgctaatgtaatcggtttttgtaatggcgtcagcaaataaaaggatgcttattattc

SEQ ID NO: 770 - DNA, 2384 bp, Homo sapiens
cttttcctgagccgcttggatctttgtggaagcgggtgggctgcatatatacaggacggattcgtataggcttgcaccctggttccgaattttgcaaatattcgcagtctgggtcactgtcatccggactgggaatccccaagacccgttaagggaggatagaaggagctggaccctagctgccccagtgggcaaggacacttgaagatcaaatctgttccggcctggcagcctctccccagctgggcaggggccccaggcaccgtgatgtggagtcaagccgcctatacctcccttggctgccccagggctgctaggatccagcaatgcctgtgagaaaacctccttcaccttcctcaggcaggagctgcctgtgcgcctggccaacatcatgaaagagatcaacctgcttcccgaccgagtgctgagcacaccctccgtgcagctggtgcagagctggtatgtccagagcctcctggacatcatggagttcctggacaaggatcccgaggaccatcgcaccctgagccagttcactgacgccctggtcaccatccggaaccggcacaacgacgtggtgcccaccatggcacaaggcgtgcttgagtacaaggacacctacggcgatgaccccgtctccaaccagaacatccagtacttcctggaccgcttctacctcagccgcatctccatccgcatgctcatcaaccagcacaccctcatctttgatggcagcaccaacccagcccatcccaaacacatcggcagcatcgaccccaactgcaacgtctctgaggtggtcaaagatgcctacgacatggctaagctcctgtgtgacaagtattacatggcctcacctgacctggagatccaggagatcaatgcagccaactccaaacagccgattcacatggtctacgtcccctcccacctctaccacatgctctttgagctcttcaagaatgccatgagggcgactgtggaaagccatgagtccagcctcattctcccacccatcaaggtcatggtggccttgggtgaggaagatctgtccatcaagatgagtgaccgaggtgggggtgttcccttgaggaagattgagcgactcttcagctacatgtactccacagcacccaccccccagcctggcaccgggggaacgccgctggctggctttggttatgggctccccatttcccgcctctacgccaagtacttccagggagacctgcagctcttctccatggaaggctttgggaccgatgctgtcatctatctcaaggccctgtccacggactcggtggagcgcctgcctgtctacaacaagtcagcctggcgccactaccagaccatccaggaggccggcgactggtgtgtgcccagcacggagcccaagaacacgtccacgtaccgcgtcagctaagggccgccgtgcatctgcacctgagaggacggactgccgcctctgggtccccccaccgtggtgcccctcaccatcctcctgggggagcagggggtgggttctccctgatgaccaggttctgtctctatggaagtcactgcggtgataggtctgtgatggtccctaagtgccagtccatctctgtggagacccctcggtggcctccctatctctgtgggcgatgcctgagggttagggatgtctccaccctgatggggtgtcccagagacattttcccatggcagtcctcctctctgagaccagggctgtcacttttctgccaggggtactgggtccccctcagcaccctccacagcacaggccttccaagtggatgtcccgttgccttattcccccagcccacaaaggcaccctggccttggcctgctgaagtgttaggaagagggtgggtgccctccagacctggggactgagtggggaaaggagttacacccgtgagtggggaatgaggctggtcctgcagcctctccctccgctcagggcttgaaggtcggtggcggagggggtggctctcacagggcccaactctaaagtggaagaaccttgttagaccgagagcttgccatccagccaagctgctcgaggccctgcagtggccttggcaatgtctgtgccacctcctgagccctcccagcatgtcctcacatgctcatgcccacccgctcctccacaagcctagtccatcctgcctgagctccagcccccagcccccactgtgcccagacatgtgtgctcagggtggctttctccctaggaccttctgtgtatatagttagttttataaccctgaatgcccccacccttcccctaagcacacaggggttaaagctgtgtgtccctcccagtggctgtggcagtgacagtgacacccacacccacagtaaagaggagactgaatgag

SEQ ID NO: 771 - DNA, 2506 bp, Homo sapiens
ccttgcggagccggcgcgcccggggtgccgctccctgcctggcgcgctccgcacctggaggtgccttgcccctctcctgcccacctcggaatttccctgtggctcctttgatccttcgagtctccagctcctctcccttccacctgtttcccccaagaaaggcaggatcctggtccctgctacgtttctggggccatggctggtctgggccccggcgtaggcgattcagaggggggaccccggcccctgttctgcagaaagggggctctgaggcagaaggtggtccacgaagtcaagagccacaagttcaccgctcgcttcttcaagcagcccaccttctgcagccactgcaccgacttcatctggggtatcggaaagcagggcctgcaatgtcaagtctgcagctttgtggttcatcgacgatgccacgaatttgtgaccttcgagtgtccaggcgctgggaagggcccccagacggacgacccccggaacaaacacaagttccgcctgcatagctacagcagccccaccttctgcgaccactgtggctccctcctctacgggcttgtgcaccagggcatgaaatgttcttgctgcgagatgaacgtgcaccggcgctgtgtgcgtagcgtgccctctctgtgcggtgtggaccacaccgagcgccgcgggcgcctgcagctggagatccgggctcccacagcagatgagatccacgtaactgttggcgaggcccgtaacctaattcctatggaccccaatggtctctctgatccctatgtgaaactgaagctcatcccagaccctcggaacctgacgaaacagaagacccgaacggtgaaagccacgctaaaccctgtgtggaatgagacctttgtgttcaacctgaagccaggggatgtggagcgccggctcagcgtggaggtgtgggactgggaccggacctcccgcaacgacttcatgggggccatgtcctttggcgtctcggagctgctcaaggcgcccgtggatggctggtacaagttactgaaccaggaggagggcgagtattacaatgtgccggtggccgatgctgacaactgcagcctcctccagaagtttgaggcttgtaactaccccctggaattgtatgagcgggtgcggatgggcccctcttcctctcccatcccctccccttcccctagtcccaccgaccccaagcgctgcttcttcggggcgagtccaggacgcctgcacatctccgacttcagcttcctcatggttctaggaaaaggcagttttgggaaggtgatgctggccgagcgcaggggctctgatgagctctacgccatcaagatcttgaaaaaggacgtgatcgtccaggacgacgatgtggactgcacgctggtggagaaacgtgtgctggcgctggggggccggggtcctggcggccggccccacttcctcacccagctccactccaccttccagaccccggaccgcctgtatttcgtgatggagtacgtcaccgggggagacttgatgtaccacattcaacagctgggcaagtttaaggagccccatgcagcgttctacgcggcagaaatcgctatcggcctcttcttccttcacaatcagggcatcatctacagggacctgaagctggacaatgtgatgctggatgctgagggacacatcaagatcactgactttggcatgtgtaaggagaacgtcttccccgggacgacaacccgcaccttctgcgggaccccggactacatagccccggagatcattgcctaccagccctatgggaagtctgtcgattggtggtcctttggagttctgctgtatgagatgttggcaggacagcctcccttcgatggggaggacgaggaggagctgtttcaggccatcatggaacaaactgtcacctaccccaagtcgctttcccgggaagccgtggccatctgcaaggggttcctgaccaagcacccagggaagcgcctgggctcagggcctgatggggaacctaccatccgtgcacatggctttttccgctggattgactgggagcggctggaacgattggagatcccgcctcctttcagaccccgcccgtgtggccgcagcggcgagaactttgacaagttcttcacgcgggcggcgccagcgctgacccctccagaccgcctagtcctggccagcatcgaccaggccgatttccagggcttcacctacgtgaaccccgacttcgtgcacccggatgcccgcagccccaccagcccagtgcctgtgcccgtcatgtaatctcacccgccgccactaggtgtccccaacgtcccctccgccgtgccggcggcagccccacttcacccccaacttcaccaccccctgtcccattctagatcctgcaccccagcattccagctctgcccccgcgggttctagacgcccctcccaagcgttcctggccttctgaactccatacagcctctacagccgtcccgcgttcaagacttgagcg

SEQ ID NO: 772 - DNA, 1433 bp, Homo sapiens
ttggacagcccgggcaacctcgacaccctgcaggcgaaaaagaacttctccgtcagtcacctgctagacctggaggaagccggggacatggtggcggcacaggcggatgagaacgtgggcgaggctggccggagcctgctggagtcgccgggactcaccagcggcagcgacaccccgcagcaggacaatgaccagctgaactcagaagaaaaaaagaagagaaagcagcgaaggaataggacaaccttcaatagcagccagctgcaggctttggagcgtgtctttgagcggacacactatcctgatgcttttgtgcgagaagaccttgcccgccgggtgaacctcaccgaggcgagagtgcaggtgtggtttcagaaccgaagagccaagttccgcaggaatgagagagccatgctagccaataaaaacgcttccctcctcaaatcctactcaggagacgtgactgctgtggagcagcccatcgtacctcgtcctgctccgagacccaccgattatctctcctgggggacagcgtctccgtacagatcctcgtccctcccaagatgttgtttacacgaggggcttcataacggattctaacggaagacactgaaaagcgccatggctacttattctgccacatgtgccaacaatagccctgcacagggcatcaacatggccaacagcattgccaacctgagactgaaggccaaggaatatagtttacagaggaaccaggtgccaacagtcaactgaggaaaaaaaataattaaacaggcctaagaagaaatcaaaaaccataagacacctatcctgctctgttatttcttcatctgctggggggaaaaagtaaattacaaacaaacaaacaaagcagaactaaaatattgggaccatggcagagaaaagcaggagaggagcaaaatgaaaattagttaacaaatgttcctcctcctctgggataccaccaccacttgtttctgtgtgtgtttattttgtttttctttcattcatgctttgcttaatgtactccaggcttcttcagctaggttcagcccacccacccccatgcttgtaatcccagtgctttgggaggccaaggcaggtggatcacctgaggtcaggagttcgagactagcctgttccactgacatttcttagacattcagcaaaacccccaccttaacctcttttctttcttgagggttggtcctgtccccacctccaccctcccaccccctggaagaggaagggcccgggcatcagtggctagtccaaataaaatatgggcttggggatggaatgggtggtggtaagttcacagagtgtagttagatcccaactcccatgacctctggcttcagtggtgggtggggcagggcagatgaaagggcttcagtgggaacctctgagagcattttcctgttcccaat

SEQ ID NO: 773 - DNA, 739 bp, Homo sapiens
agctggctggagcagcatcggtccgggaggtctctaggctgaggcggcggccgctcctctagttccacaatgtccacgggcggagacttcgggaatccgctgaggaaattcaagctggtgttcctgggggagcaaagcgttggaaagacatctttgatcaccagattcatgtatgacagttttgacaacacctatcaggcaacaattggcattgactttttatcaaaaactatgtacttggaggatcgaacaatcaggcttcagctgtgggatactgcgggtcaggaacgtttccgtagcctcattcccagttacatccgtgattctgctgcagctgtagtagtttacgatatcacaaatgttaactcattccagcaaactacaaagtggattgatgatgtcagaacagaaagaggaagtgatgttatcatcatgctagtaggaaataaaacagatcttgctgacaagaggcaagtgtcaattgaggagggagagaggaaagccaaagagctgaatgttatgtttattgaaactagtgcaaaagctggatacaatgtaaagcagctctttcgacgtgtagcagcagctttgccgggaatggaaagcacacaggacagaagcagagaagatatgattgacataaaactggaaaagcctcaggagcaaccagtcagtgaaggaggctgttcctgctaatctcccatgtcatcttcaaccttcttcagaagctcactgcttt

SEQ ID NO: 774 - DNA, 1626 bp, Homo sapiens
ggggcagcgggcggcggcagcagtggccgcacatctggatggaagcgagctttgtccagaccaccatggctctggggctgtcctccaagaaagcgtcctctcgcaacgtggctgtggagcgtaagaacctgatcaccgtgtgcaggttctctgtgaaaacgctgctggagaagtacacagcggagcccatcgatgactcatcggaggagtttgtcaattttgcagccattttagagcagatcctcagccaccgcttcaaagcctgtgccccagcaggtccagtgagctggttcagctcagacgggcagcggggcttttgggactatatccggctggcctgcagcaaagtgcccaacaactgtgtgagcagcatcgagaacatggagaacatcagcacagcccgggccaagggccgggcatggatccgggtggcactgatggagaagcgcatgtcagaatacatcaccacggctctgcgtgacacccggaccaccagacggttctatgactctggagccatcatgctgcgggatgaagccaccatcctcaccggaatgctgatcggactgagcgccatcgacttcagcttctgtctaaagggggaagtcctggacgggaagacccccgtggtcatcgattacacgccctacctaaagttcacgcagagctacgactacctgacggacgaggaggagcggcacagcgccgagagcagcacgagcgaggacaactcgcccgagcacccgtacctcccgctcgtcaccgacgaggacagctggtacagcaagtggcacaagatggagcagaagttccgcatcgtctacgcgcagaagggctacctggaggagctggtgcgtctgcgcgagtcgcagctgaaggacctggaggcggagaaccggcggcttcagctgcagctggaggaggcggcggcgcagaaccagcgcgagaaacgggagctggaaggcgtgatcctggagctgcaggagcagctgacaggtctgatccccagtgaccacgcccctctggcccagggttccaaggagctcactacacccctggtcaatcaatggccctcactgggaacgcttaatggggccgagggcgccagcaactccaagctctaccggagacacagcttcatgagcacggagccgctgtcagctgaagccagtctgagctcggactcccagcgcctgggagagggcacgcgggacgaggagccctggggtcccatcggaagctcagagccaaattagtggctcccttcgagcgaatgcccaggacttcaacgcatgcactttgtgttgacctcatccctggcttcaccttggtttttcccatcctagttctccctatgcctgaatatcctgtcttttcttttttataagcaaccacactgtattggatgaccctagatcttctttgagacaaggcaggctgtggccatgtagccccatcacactgtgtttgtgattgtctgtgtgtctgtctcccccaccagactgtgagctccatgagggcagggaccgtgtcttgtccgttctctgtatccccagtgcttggaacagagcgagtgctcactgtgtatttaataaatggacaaagagaaaaaaaaaaaaaaaaaaa

SEQ ID NO: 775 - DNA, 82761 bp, Homo sapiens
tatcattgcttgtgtattcccctctctctctcttcttttctctcctctttttgttgcccttttattctcatacttctctaggtgctctcttaggtggtaaaaatgccaagagaaatcaatattcagggaatgctcaactgtctagcttctactctgagttcccaactagcatatcctacttcccactggatagttccactttaaagtctcaaacaaaatagggccaaaacagaaatctgtctccacaaactctttcctctccatgacttgcccatctcagtatgtattattaccatccatcctatagctaggtcagaaacccagggtgtaatccttgattcagtccccttcctcatcctttatatccaatttcaaaaggcaagtgtgatcgacctatgtgttccagtccctactctttttgtgtgccttgccaagcactcttatttaagtcaccatcatctttcatctggactacaaaagtcttctaactcttctcagtggtatggaatcttgtaccttctataataattcattctctgtactgcagccaaaaaggccatttaagaaagcaagttctatcaggcaaggccttcactaaagccttcatgggctaccattgtacttaggatggaatgcacattctaactctggcttacaagatcctgcttggtctggtcactactcacttttcagcctcatctcttccacttctttcattattctccaggcatatggccttccacaggtactggagctcatggagttctttctcagtcagtgatggtggcccttgattctgcccctgaattgtctcatgctgttcttcttctctccatgccctgtgccttccataattgacatatcatcatctctttcccctgtcagtataaaaacctccttagttttctacccctgctcacctcatccactacagtgcgacagaccacatattttattagtttggtgcaaaattaattgtggtttttgccattactttttatgcaaaaaccgcaattgcttttgcaccaacctaacacttccgtgctgaaaaccacttataggatctcattgctacaagaaaaataaaaatcactaaacttttgtgaaaacctattcctgcctaaattgttggccttactccttttagtcccctaaatattcatcctaggttcaaccacactgggttatttgccatttcctaaaagggtaatgtttgtagctcatactgtttatctggaattctttcctctgttccctttcatacctaatcgagatcctgccaccttcttggtgaagtcttttcagactctttcaggaagatgttctcagtcatttcaatgaagattcactaacgcattgaatcaaatagcacaatgagggtaccacctgtgttacctctgcatgtatctcataattcatcgggccatgaattctttgagtacaaagcctgtgactttattcacttctatattcagactttactgaacatggttgatactcaataagtgcctttttatttttaacctttttaaacttttaggttcaagtcctatgtgtatgtttgtgatataggtaaatgtgtgccacgggggtttgttgtacagattattccatcactcaggtactaaacctaatacccaatagttacttttctgctcctctccctcctcccaccctccaccttcagataggccctccataaagaacagcactaggaaaagaaaagtgctattttaaatgaatgcatgaatgattcccttcctggagaaacttactccttccttcccactgcataatataccaccctctgatccaaactgagactcacctccacagatgcaaaattctatgaaatttcccgtcactttttgttacctaggtcagactaaaagcctcttgttagaaactctgcctcaaagtctaacttatatctgtgcattttctccaggacttagctttgggatggacgcgtggaagctccatgatgaaaggactcttttgtgtcttcaccacaactatatcccatataggcacttgctgactatttcttgaatacacaaaagaatgtcctcttatacatgttgtcacccttatcctaagtggatatgcttcagttccaaacagggctcccctctccctgagtggcctcatctccctcactcccagtgtgctcctgctgcccacacctggccctcccatttatttgtcctcaatcccacagcttgcctattctgttttaaaatgcctgagaatccatcagctttccctctttccagtgtccattcaaatgtacctctaattccattcaccatctgactctgcttatctggtcttctgcccaacacccttgaacctgtttggtatgagtgctttgtccggtccttacatgtcgtcgtcttttgtttgtttcctgccttcacagccaagatgtcagcaaacaacaaaaggaagactttgtctcccctaaaagtgcatggggactccatacctacagagtattcaatcagtgccgttatctatgtggcaggccacacgtgtatcctgagaggaccttagaatgatgggtttgggaaactgagtccccaaatggtcatggaggaaataagcagcatatctagtactaaatttcacatctcctcacccctactccatgcattagattctcataaggagtgtacaacctagatcccttgcatgtgtagttcacagcagggtttttgctcctgtgagaatctaatgccctggctgatctgacagaaggcagagctcaggcagtaatgctctctcacctaccgctcacctcctgctgtgcatcccagttcctaacaggccatgccacaggaccctgtggcacaggggttggggacccatggtctataggactactataagaccatgctgcaaagatataactagttattgctgaaaactttaataagtaagtgtacctgacctgtcctttctacctccttatttcagcctcctcctttttatcctggactattatagcagctacgacttaggttgggccagaatgtgcagtaggagggaagtggctaacatggtctgggccttagctgaatgctaaggttttctggaggaggtccctaatgcacaacacaaaaaggagtgcatgcctgagaggcaggaaagttgttcctctgataatgatgacatggaggatctggagcttgcagaagcaagtattttgaggaggattgagagctctcctgttagacatatacagggatgagaatgagagaagagaatcgggagataaggtaatgcctgagatgaagataggttaggttgtctgagcataagtgatctgcaagagctggattctgctctgtgcactccatggctcagcttcctgacctagcctattcccctcaaatattaaacattcttctcccatcaggtctctgctctgcctttggattttccctctagtgattattattttcagtctgatttctgccattatcctggttgttcctgttttcactgctcccccagctcatatgcccttgacttgctccagccccaggagccagttgattccagcataggcacccctccctagtcgtcttgtccctggtcccagctgtgttagctgtctcactgtgccctccatctgcctggtcttccccttccaccattgccccaagttgtgctcacccctcagcaggaagctcaattcatttggcatgcgctttagggaaaactggtgcagttttcctctcttagagaagggttgggaaagagagttggaaagggagggtctggctatatcctcataatcagctactcttttcccaaaagaaaaaggaaacaggccctgtctctgaggaataccctgaaagggccccatgatgagcctagtctcttctctgtggccaactctaggagccttctctgcttcaggctccggtcttctgggattcctgcctctggcttcctacaggccctactccctcaccattctgtggtattcgatcatgcctctccctcgaggcaggaaggagtgtgatttcagtaatcagtgcacccttctccaccctccccttccttctccaccctccccttccttctccaccctccccttccctctccaccctccccttccctctccaccctccccttccctctccaccctccccttccttctccaccctcccctccccttccttccctgcagtgcaaactgcaaaatagagcctcctaagaatgcacaagcagctgtcttatgggtatgctttccagttgtgactcagaaaagtggagttcaggcataacttggtcaaggttatctattctttgttttatttggagtttggatgtttttgtttgcagacagagctgtgagttaaggtaataggtgacagatctaggtttgtctcagcttgtgaccttgacaaggcacttaacctctccgttctttgaatggtttcttgttgtggggacaaaaatcccagtccttcccacctcactgggtggggtgatccaatgagatcattgaggaatcactctcaatgttattgttgctcaattattaaccattaataataccaacatatcaataagtcctcttatcactggtcttggagcttgctattcttctgccatggtcctgagaaacgaagttggtttttacagtagcctctaagtcttttaacctgaaataactctacatgggagcccagtagctcttattgagactgtattctggtcacattccctttcttcccacagagacacacaaatcttccatcagttatcctaactcttgtccctcagagacaagcacttgcctctcacacctggagtctccagaacatattgggttgaggtggacttctacacagggcttgcactgtgaaaatctgaattaagtttagcagacacaggctacatagagatggtgatccagacttgaagttcacaagcttatattaggaacgtcattgtggaagataccaggctgtgttagggaaagattgaagtaattatatatttaattattttgagaaaccaccatatgccattttccacagtggctacactattttgcattcctaccaccagtatacatggttccaaccttactacttcctcattaacactattttctggattttgatcatagccatcctactggctgtgaaaatagtatctcaatgtgtttccatttgtatttccctaatgattactgatgttaggcctcttttcttattgaccactggtatagcttcagaaaaatgtttattcaagtcctttgcccatttttgaattggattatttgggaggggggtattgtaggagttcttgatatattctggatagtaataccttattagacgtatgctttgcaaacgctctcctattctgtaggttgcctttctactttcttgatagtccttccatgaacagaagttttagttttgatgaagtccaatttatttttcttttgaggcctatacttttggtgtcataaccaagaaaacattgctaaatccaaagtcctgatgcttttcacttatgttttcttgtatgggttttatgattttagatcttatattccatctttgatccatttgatttaatttttttatatggtaaaggtccaacttcagtcttttgcatgtggctatccagttttcccagcaccatttgtttgaaaacacaaataatgaattctttttgttttttccacaagttattggggtacaggtggtatttggttacattagtaagttctttagtggagatttgtgagaaccgggtgcacccatcacccgagcagtatacattgcaccatatttgttgtcttttatcgcctgccccctcccactcttcccaagtccccaaagtccattgtatcatgcttttatggctttgcatcctcattttactcaaccccatttacccaatagcatttggcagttgagcatttcccaattcttggtttcctgaaccacattatcttgcaggttttccttcttcctcattagtggtggccttctgctggctagttctttttttgcctctccttagaatctcttctcttggaccactaaatggaaggcatttttcatcctttttcatggttttaactatctactctttgataactcacaactctatttcttcaactcagatatctcccttgaacttcaaattggtaaattattttctttctttttttttttttttttgaatggcatgcctgttttatttaattttttctttaaaacactgaaagtgtggtcctgtatcagcagcattacctgggaataattcacaggctctcaggcccactccagactttttattattattatactttaagttctagggtacatgtgcacaacatgcaggtttgttacatatgtatacatgtgccatgttggtgtgctgcacccattaactcgtcatttacattaggtatatctcctaacactatccctcctccatccccccaccccacaacaagccccagtgtgtgatgttccccaccctgtgtccaagtgttctcattgttcaattcccacctatgagtgagaacgtgcagtgtttggttttctgtccttgcgatagtttgctcagaatggtttccagcttcatccatgtccctacaaaggacatgaactcatcattttttatggctgcatagtattccatggtgtgtgtgtgccacattttcttaatccagtctatcattgatggacatttgggttggttccaagtctttgctattgtgaatagtgccacaataaacatacgcgtgcatgtgtctttatagcagcataatttataatccgttggggatatacccagtaatgggatggctgggtcaaatggtatttctagttctagatccttgaggaatcaccacactgtcttccacaatggttgaactagtttacagtcccaccaacagtgtaaaagtgtttctatttctccacatcctctccagcacctgttgtttcgtggccttttaatgatcgcaattctaactggtgtgagatggtatctcattgtggctttgatttgcatttctctgatggccagtgatgatgagcatttttccatgtgtctgttggctgcataaatgtcttcttttgagaagtgtctgttgatatcctttgcccactatttgatggggttgtttgatttttttcttgtaaatttgttgaagttctttgtagattctggatattagccttttgtcagatgggtagattgtaaaaattttctcccattctgtaggttgcctgttcactctgatgatagtttcttttgctgtgcagaagctctttagtttaattagatgcccctgtttgcagatgacatgactgtgtatttagaaaaccccatcatctcagcccaaaatctccttaagctgatcagcaacctcagcaaagtctcaggatacaaaaatcaatgtgcaaaaatcacaagcattcctatacaccaataatagccaaatcatgagtgaactcccattcacaattgcttcaaagagaataaaatacctaggaatccaacttagaagggatgtgaaggacctcttcaaggagaactataaactactgctcaaagaaataagaggacacaaacaaatggaagaacattccatgctcatggataggaagaatcaatatcatgaaaatggccatactgcccaaggtaatttatagattcaatgccatccctatcaagctaccaaagactttcttcacagaattggaaaaaactactttaaagttcatatggaaccaaaaaagagcccacattgccagacaatcctaagccaaaagaacaaagctggaggcatcatgcttacctgacttcaaactatactacaaggctacagtaaccaaaacagcatggtactggtaccaaaacagagatatagaccaatggaacagaacagagccctcagaaataataccacacatcttcaaccatctgatctttgacaaacctgacaaaaacaataaatggggaaaggaattcctatttagtaaatggtgctgggaaaactggctagccatatgtaaaaagccaaaactggatcccttccttacaccttatacaaaaattaattcaagatggattaaagacttaaatattagacctaaaaccataaaaaccctagaagaaaacttaggcaataccattcaggacataggcaggggcaaggacttcatgactaaaacaccaaaagcaatggcaattatttgcttttctaacatctattcttatctcatatacatgtccaactttacaggagcaaaacagaactctgcttcctctctccctccacacctgtaaacctacttttctcttcgtgtttcctgtgcattgaagcccttccctttactcaacttctcagattggagccttccttgaagcccatcatattctcataaccccacattgaatcaatctaccaacaaattctatcaactggaccttcaaagtatatcccaagtgtaatcacttctcattgcctccctgctgccactctggtctaaggcaaaatcatttcctgtgttggctataacaataacttttgtaacaataacgactcttttatccttgtcccttacatcgaacccggtgcaggtattttaaagtttaagtcacagtataacagaaccctgttcaaaagcttctaatagctttccaccacagatcaaacaaaattcagtcttcaccatggtttacaaatacctttttggtctctggacctttgctacctctcctaccatctcctcctagtcactccagtccagcaactggtggccttatactgtccctcaaattcaccaaacacattccagaaatcaaggcctgtatgtctgttcctttcgcctggagcactgtcttccatacagctgcatgccttgttcacttgtttcatcaagatttctaccaaatgtcaccttctcagaaagacctatcatgaccaccctatctaaaattgtgtcccatgtcatttttctgtcttattatcctgtttttacccacggcactttaaaaatttatttttcattaacaaattgtatataattatcatgtacaacatggagtttttaaatgtgtatacattgtggaacagctaaatcaagcaaattaacatattacctcacatacttttccatctttgtggtgagaacagttaaaatctactctcttcataagtttcaagaatataatacattgttattaactgtagttcccatcttatacaataggtctcttaaatttatttcttttaactgaaattttgtctcctccaaccaacatttcctcaatcctgacacccccacaccctgggaactaccattctactttctctacttctgtgttcaacttttttagattccacatctaagtaagatcatgcaatatttggctttttctgcctgacttatttcacttcacataatgaactccagatttatatatgttctcaaatgacagaatttcctccttttttaatgcagaatagtattccactgtgtgtgtgtgtgtgtgtgtgtgcgcgcaccacattttctttatccattcatccatcgatggacacttagactgattccatatcttggctattacgagtactgctgcagtgaacattggagtatagatatctcttcaacatattccttcagatatatatccagtactgggattgctagatcatatgatagttctatttttaagttttggtagttctatgtttaattttttgaggaaacttcataccatgtgccatgatggctatactaatttacattcctgccaaccatgtgcaatttctctataccatctccaatgcttgttatcttacaacattttaataatagccattctaacttcatagcactttaatgctgtagtgaacatcagtgtggatatctctttaacattgttttagacatccagacacccagttctggagttgctggatcatacaggtagttctatttttaactttttgaggaagctttatactatttcccataaaggctgtactgctttacattcctaccaaccatgggcaaggattctcttttcttcatattctctccaacacttatctttcatcatgttgataatagccattctaatttcatggaacttatcaatatctatttgtcatgtattgattttttaatgcaaatgtctcctattagcatagacgttccatgaaacaagaactttgtcttccttgttcaatatggcattcctagtagtacgtagagaaatactgacacatagtgggtgctcaataatattgtatagaatagttgttgttggctgaataaaatgtgcccccatagtatcctaagttaatgctaaacgtctatgactgtccctgagacccataaaaataatggagagctgaggcttggctctgatcattgtggagctggcagaaaatttaaatcatttcatgtatctgttttgccactttagaatcagtcgagtccctgaagaaccaaatgggagaatgaccaaaactcgggatccccaaaacttttcatatttgaagtgtcatttctctgtgagctcccagggaacctatatgtttggagaataaagcctgcaccttcctcttcatcatctgggccaagtcattccccactaggtcttcccttcaccatctgcatttaaagcttcttaaaagcaggaatatttccaaacctttatatctccaggacaatagcagaaacataagccgtcaatgtgtgtttgttgacttattgtccgaaatcaagtttcatatctgcccagactacatttgattagaatccaatctgttcttttgacagccttcccccagtacctaacatcatcacaatcttcttttaaatgccaacagagagagagattcatcctggtctctgccttcacaaagtctagcatgtaggaatctactgatgatttaccaggttctaggcactttactaaaaattgtatatgtgctatctcatttcagtcttccccatttttgaaaatggggaacaagaggctgagagttgttacttaacttacctaaggtcatgccaacagtatttagagtgaactctatcccatgaatggcatttgatgagatgctgcatgggcaatagagagaaaggacacacacagcgtgtcagaaaagaatcatgaaaacattggctttgaattaggcttcagtggtccccagaaaatgcccaatgtcccttgccttccaggttttacacgtgctgtgtccccttcctggtgtattcctcccttcagacccactttatctttctaaaccctaaatccttgactaattcttaatagtgaatccctcccctgccaaaagagcctctgtctgttttttaaagtctgcatatgtcccattgaattttaattgattttaatgtctgtccatcctccaatccagactgtgacctccttgagaacaggggcatgatccttcaaccctatgccttaaaatctagcataatccttcacatataacagatgctcagtaagtgatcgttacatttgataaaataagataaacactttttattgagggcttagcagataccaggcaaaatgataaatgttttgtatgtataatctaatttgatcttcactgcttccctactttatatatgaagaattagtgttcaaaaaaaattgtttttcctaaataaacaccaagaagcaaatattttatcagcagtgtccaatattttggctgggccacactggaagttgtcttaggccacaaataaaatacactttcactaatgatagctaatgaactaaaaaaaaagtcacaaaaaaatttcataatgttttaagaaagcttacaaattcgtgttggtctgcaggttggacaagctggttttagaaggagggagggggccaggagaaaaaaacaaaattggtaaaacattctaaaatatgtttctatgccaaaaaaacctttaagactatttatgctcaaggacctttccaactaccccacctacccacacggaactctcaggatagatctctgctatcctatccttccctctcccatcagggcctgtatttccagctttcaatttgctgcctctttccagcatcccaggggtctttttagcatctttatcctccagagaattgctaccctcatgtaggatgctaataagaggacaaataccccagctcttttgcttcccacactctaacccctgtaggaccagattccactatcacaacctgcctcagacctggtaagtttgtctctctgtctgtttggtcttctcagtgtgcctattatatggttgaacaaagataggactgccactaaggtaattttttcactgaggttgtcctctacttcagattaaaaggacttacaaatgaatcacacttttgaccactgttttgtggccatgtactttaattggctcttcagataactgtctcccctagtaatcgccatagtagcctatgaagtaggaatcaacctctccaggttacacggatagggaaacagtttgagagagtttaggtggcttgactgagatcacacagctggtgagttgtaaagctgggatttgaatctggctgcccttggacatccatgagtgagtgctaaattctaggttggtcacttccagatgctcatgagcacctacaggataaagaacttgctcctttccttgtgagacagccttgttcctggcatttgaactcctattcttatatattttaggtaaggcctttcttataccaagtgctaaaataaataagaacaaagcaggggaatgaggggcatgaaggagagctattattatggagagctatctggaggaggctgggagtcttccttgcctgatctcagtaggcagatgagtcagaggaaaataacactagagtataggcataaaagggttcatggcagagagtagaaagctttaagagtctctagacattcaccatggagagggctctgcagccatgccacctactcccagcctatacatcactgaatcagactaaagtggcaaaggttcctttgaacatggtgatgataacccatcttctgccttgcatactttcccagtgccctaaaatctcatcctgagtgtttttcatgaggtctaacctcaaatattagtaggaaagtcaaaaagtgaagacctccaaggctctcacctcaaccttgacctctttcctaaaattcaggaatattatactcaacatatgctcttccaacttcattttccccatctgtgcaaagtgggtgagacaaggggaaattgtgatcattatgctgtgtagttccagatcaagggtggagcaaaagttttttgagtagcagtttaaggcctgagaaaatctgattcaattattaaaagactgagatggaagaagaaaagaagggagggaaagaaagtagggctgtctcattcatgactggattattcagctctcaattttctccacaaagggtactgaagcagggacactccaaaaacaatgtcttacataaatgtatgtccctgtgtcttctgagtacaggcttgctcatgcatcttgcacaataacgtatatagatacacacaatcacatgcccagccaaacactgcattctcatcaaatggaacagttttacatgcatcatttcacaaggttcttcacactctgatttctctatcccagacctttcagctaccatgaaggctaaaatctcttctaggcttgcttgggccccggctggatggtggaaattcagggagatatcatagaagagaaaaacaggaaatacatgaaggcatgataagacagaaaggaacaagatgatttgctcaatatgagagtgacagccacggttgacactgggatggaaaggaggcatcctggaccacagttctttcctgcagatcacattagaagaccttaccctcctccttcctgctcctacatctttccccaaagcagtttcctatgatctctgggtatgggtagctgatactaaggattgcaaggagcagtgcattttaagattaggaatacagatgagcaacactatagggaacaattgggtccactatctctgtttcaattagcagttggagcacagtcacatacaattatattagaagctcttttctttcgatagaggtacttttctttctactctctcctatgtctatttctggttcttgttctcatcttttttatctcaccacctctccctctactgtcccctttgccttttttttgtttaatctttcctttctctcaaattcccaattactacctggttagataagaaaaaaatgagataaaaatatattttaaaatgtaggtgagggaagatcaggagggtgtttgagggtaatagacaggagatatggggagatgtatggaagcacagtactgtcatttggtcaaacttgggtctccatttttgctttcagggaatgattccatgttcccagttactaaaatttacttcttacctctttcttttatgtacttttgatttttatgagagaaaatgccttgtattcaatcatttctcaatgaccttaacagattctttttatagccaaattagcctgatccctaccactgatcaattgtgcatgatcacagctgtttctaccagcatccatataggacacttgaggcaagtgcaggatccttgtactaaacataagccaggcaatcttatgcctgtatgagactaccagagactcagcctatcacctctgttttgctgttcctggtcagaacctaggttctgagcctcatctatgggttattataggctcaatggcttgaaaaatccatccaagatctctcctccttcctatcaattcccttcagacctgatctttccatctcgaaaagtaaccacatttgagtcttccattgaatctgcctgactttttattattaatattacttttatattttcacacaggcagatgaatccaaagaaaaaaaatattagactataagcaaaagatggctcacaggtagaagaaaactgtaaaattctctagcccacagcctgtcaccatagagaagtttctacagccatgccacttgcccaccacccacagcctggacatcattgaaacagatacaagtgtgaagggctcctttgaaccttgaagacagtaacccacctcctgccttgcattatctcccagtgccctaccatcttcccatcctggatgcttttcatgaagcctaatgcaaatacttcctgctgctgttcagccatagcataatgatgaatcccagttgcttcatctctcagggattcctaggactcagagcaaggcagtgaggtcttctctaaccaccttacttggccatgaaactcataaaccataccatcagaacccaacctcctttctgctcatgggaattccaggcccggaggcatcccacttttggattgcttttcccttctgctccatgtatgccctggcagtgctgggaaacatggtggtgctgctagtggtacattcagagcctgtattgcaccagcccatgtacctgttcctctgcatgctatccaccattgacctggtcctctgcacctccactgtgcccaagctccttgcacttttttgggcaaaggatgctgagatcaactttggggcctgtgctgcccagatgttctttatccatggcttctcagctgtagaatctggtatactgctagcaatggcctttgaccgctacttagccatttgctggcctctgcactatgggtcattgctctccccagagtctgtaggcaagctgggggctgcagcgtgcttcgtggtttgggactcatgaccccactcacctgcttactggcaagactgagctactgcagtcgagtggtggcccactcctactgtgaacacatggctgtggtaaagctggcttgtggaggaacacagccaaacaacatctatggcatcactgctgccacactggtggtgggcactgactccatctgtattgctgtctcctatgcactcatcctccgagctgtgttaggtctttcctccaaggaggcaagggctaagacctttggcacttgtggctcccacctgggtgtcatacttctcttctacacaccaggactcttctccttctacacacagcggtttggccagcacgtgccccggcacatccacatccttctagctgacctctacctggttgtgccacccatgctcaaccccatcatctatggcatgaagaccaaacagatctgggatggggccctccggcttctgaagtggggccctgctcagtcataaagtcttcaaccccaccctgaaacctttatcttctttgcccctcagccctcgggggactggtggctcccaacatgataggacacagaaactcatgctcaatggtacccgtacttcgataaggagcaacagcaaagtcagatggtggaagatctgtcaggtgtttacttatgttgtagatatggttacaaagctcagggagcccctgtctaatgggaaatatggctaccaaactgatgatggcctcccagggaatccaattctgcatctgacattgttcctaccttccagaagatattgataaaatgggaaagatatagctactggtctaacaaggagaaataaccctcatccacaggcaggtgttcctactctgataggaatacatacatgcctcccttagcaagttctaacacacccacacccatacatagactcaggcagagaggcagagacaaggcacttagcaattagccatagggatgataacaacgaaaggaggagaatcctgggcaaactgtccagtgtacacaagaataagtaacaaggtataatgtcaatctaggaaggttctctggagtagtttttatcttttcactgagcatgaactatgggccaaatattttgctaaaatctagggcaaattaagtcaaagggcctcctcttgtgataactgctcactgttagaggaaacacacataaggagacagtggccaaactgaatcatactatttcagttgtccctccgtatatgcgggaggattggttccaggaaccccatataaaccaaaatctgtgcatattccaagtgagacctaagaacagaaatatacaaaaagttggctctccttattttcagattttatatcctgcaattctgatatttttatctgtgtttggttaaaaataatctgcctataagtggacctgcatatttcaaacccatgtcgttcaaaggtcaaactaatatgattagggtaaacacagagaccgtgggtgtaagaacaccaacttgctcagaagaaatgaggccccaggccacacctcatctcaccccatctctgtatgcaggtaaggccacgcctgggtgtaagttgcaagagcaaagcctgatgcgagatgacatcctaagtatttccttctatgccctgggagtggccttgtgcagattccactaagcatcaaagttccagggaaagaccaagaatgtagtaaaagtctgatccaagggtgagaggataattttcctaacatcactgacatttctgagaacatgaaatatgccaaatgctattctaggtgttggacatacagtgattcaggaagataaatttttgacaacttgaatatgggaccccagcaaaactcccctatgtactctcagtgactctcctattactcaacctgaagccatccaaataattcttccttcaccccaggtctcaccacaaacgagtttagtagtcttaatttgcccacagacaccccaggttgtcagacagaggccacagattagccagtaaattctattctccagggtccttaactcaaactgtaggggaagtcaagaaaacttactacatcctatttgggactatattggctatggctggattattttttccaaagctcttttttttaaatgaggtataatttacataaaatacatctctgataaatacatacacgtcagtatacacaccatcttaatcaagatgcaaagtatcagctgggcatagtggctcatgcctgtaatcccagcagtttgggagattcaggccaacagattgcttgagccccacagttcgagatcagcctggacaatatagcaagacttcgtctacaaaaaaatacaaaaattagcctgtagtcccagctactcaggaggctgagaggtgggaggatcgcttgagcctggctgagttgaggctgcagtgagctgtgattgcaccactgctctacagcctgggtgacagagtgagatcttgtctcaaaaaaaaaaaaaaaaaaattcacaatcacaaaagattcccttgtgctccttcccagcaatacctcgacccttcatggagataaccattgttctactgtttaatttttgatcaccttggattaaatttaatttaccactctagaaattcacataaatggaattatacaatatgtatactttgtccgacttctttggctcaacataatgtttttgagattcatgttgtgtccatcaactgttaatttcttcttattgctaagtaattttccattgtatgaacatatcaaagtttacttctggatacctgagtttcccatattttactattatgaataaaactgctatgaatatttcttaacctagcagtgaaatggctgggtcagaggttaatagaacctgcttttccaaaataatcacaccattttctaatctcaccagtgatgtataacagttcccagctgttctacatcctggtcagtccttaatattgtcattctttttttcattttagccagtccattgactaaaagtaagctagtaacttgtgattttaatttgcatttctctgatgttgagcaacttctcacatgttttctgttcatgcatgtgccttctgtagaatgtttgttaaagtcttttgcccacttctaataaattttttattttgttgatttgtactagctgtttatatattctggatttaagtcatttgccagacatacatagtgaaaatattttattcaattttgtgacttgccttttgattttttttttaattttttgatacagggtctcactctgttaccctggtgggagtgcagttggtgcgaccttggctcactacaacctcaacctcccaggctccaagtaatcctcccacctcagcttcccaagtagctgggactacaggcatgagccaccacacccagctattctttctttctttcttttttttttttttttttgtagagatgcggttttgccacgttccccaggctggtctcaaactccagggctcaagtgatccaaccacctcagccttccaagtgctgggattacaggcatgacccacagctcctgacctccattttcttactagtatcttttgattacaggaaatttttagttatgatgaagtccaaataatcaatttcattcatggttagtgctttgttttatggatttagcttttaatttgaggcctatgatccaacatgaataaaaattgtgtatgttataacctagagttgaagatttatttttcacatgaatattccattgtttcagaattatttgttaaagattttcttttccaaattgacttgccttggcaactggatcaagaaagtgatcaagaaagtgtcaatgctatactttcttaataatagtattaatagtaagtctcaaaatggagtagtgtaagtcttctaacactacacttccacagtgggtcttattattctgggttcttcgtattcccatatatattttaaaatcaatttgttcatttctacaaaaattgctagagttttgattgtttgatatttaattttttaaattttattgtaatggctaggaactccaatatatcgttgaataaaactagtaaagcagacatccttgtcttgtttctgatatttttcttttgttaacacctctattgagatgattcaaatattatacagttcacccatttaaagtgtgcagttcagtggtttctagcatatccacagatacatgcaactgtcaccacagtaaattttaaaacattttccttacctcaaaaccaaacctcataccctatagttatcaccctcatattctcctgccccaccagccctaagaaaccactagtctgcttcctcctgcctctctagatttccctactccagactttcatatgaatgaaaacataatgtacggtactttgggactgactgctttcacttagcataatgctttgtaggttcatccatgttgtagcatatcagtatgtcattcctttttctagctgaataatattccattgtatgaatatataccacattttgtttatctattgatgagctgacagatatttaggttgtttccaccttttggcgattacagataatgtgactataacatcgtgtacaactgtttgtgtggacatatgttttcatttctcttgggaatatacctagaagtacatttactggtcatgtggtaactctgtttaaccatttgaggaactgccaaagttattctagagcagctgcacaattttacttttctcataccagaagtgtaggagagtttcaatatgttcacatcctaatgcctgctatggtctctcactcttatattaacagcgttattgtgaggtataattgatatgcaaaaacttgtacctattttgtgtagacagtttgagtttggacatatgcctatatccacgggcttgtttctgaagtctggaggatagttttcagtctttcatgatgaaatacgttcacgatacacttctcacagatgccatgttgaaaaagtacacacctattgaaatttgttgcaagttttcatcaagagttgtgttgaatttggtaaattatttttcttcacatacttaggtaaccatctggtttttctcccttatgctgctgatgcagtatactatacttgcttgtttttatttttattttactattttttttttgaaacggagcctcgctctgttgcccaggctggagtgcagtggcacaatctcagctcactgcaacctccacctcctgggttcaagcaattctcctacctcagcctcccgagtagctgggactacaggcttgcaccaccacacccagctaatttttgtatttttagtagacacggagttttgccacattgaccaggctggtctcaaactcctgacctcaggttaactgttcccctcggcctcccaaagtgctgcaaaatactgcttatttttaaatgttaagctaccttgcattcctggaataaatcccacttggtcatgatgtatcatcatatttatatattgctggattcagtttactaatattttcataaggatagttacgtttatgttcatgataggtattgctcttttaattttcttgtaattccatatcaggtttttatatcagggttttgcttgtctcacaaaaatatactggaaactaatctgttatactctattttctgataatattcatgtaacatttattttatttttttaaatatttgatagaattctgcatgaaagaaacctgggtgtgaaggggggtttctttttatttcatgttcaatttttaatggatagagatttattaaggtttgtattttcaaaatttttctatttgctccaaagtttcctctaaatataactgtcaaaataatataccaatgttagtataaatgttcataatatccccttattatcctttcatttctataggacttgtcatgtcttttaattcttggttatttgtgtgtgccttgtcctgttctgtaatgctagtttgtgcaggaaggtgtatccattttgttaatttttagaaccaaattatggcttttaaaatttttgtgtccatttttctttgctttctgctgttcccttttctgaatctcctctcatctgtttacatttaatttgttcttctatttctacttaaggtggtaagttagcttcgatgaggtcatttcatgattttcaagcaaagagaaactattctcttttgtcattgggaagatggtgcttctgcaagcctagaaagttcagagaaaatataaaatccattgtgttaggctcatatacccaaatgtctcatttccagctcttaaactctcatattttctctactatggaatttgttttgacatagatgacctatggaggctgcacattcagtcttccatatatttctgttgcccttaatatcatattctgggcctgatttttcatcagtctgtcctctggcttcaggaaattagtctcttttgaagctactgtggaggactgcctttagcatcatgttttaagttaagggagttgaatggcatgagcttattttctttttgcaatgctccaaatgccatcaaaatcagccacccacaccacaatccataatattaccatattcccaggctgatcaagcattcattcttccatctccttccacctttacctcatcccaattaacagtaggacatctttagtaaatgtacatcactgtgacagatgttttcactactctgtttaccatcagcagtgtgatccctgttgctttcagactggtagacagtcaaatgacaaatcctaccatgagagttttctttcaaggaccattcctcatattgttcttcttagcttggattctctagaaaacagagcctgagacaaaaccacacgtgcaagcattatactggagagtgtattatctttccaagagtgagagaaaaagggagtgaggcagggaaggaatgcattattgagctgccaccaacttagccacaagctgactgctcagtgccccagatgtcttccaaagggctctctggagctgctacacctcaacacagaccatatcggggggaaaagaaacgcaatttatccaatgattccttatcttccattagttaaagtccacacctatggtgaattaattcccttgcacttccaagttacaaatgtgtcagtgaccaagcaaagccataatatttcattcctcagaagcaacagggaagctgttaaagctaaagggtgttacaaactgaaagtttcacacaaaattcatgtgtgaaagcccttactcccaatgtatgtgactgtatttgaagacagggcctttagcaaagtaattagggtcagatgaggtcatgatagtagggacttcatgatgggattactgtccttataaaaagagacaccagaaagcttgctggtgctttctccccaccacatgaggacatggtgagaaggtgaccatctgcaagccaggaaaagaacccattctggcaaatcacagactcagatttccagcctccagaactgtgagaacacaaatttcaactgtttaagtcacaaagtctatggtattttgttacagcagcctgagctgactaatacagacagacatgcaacaataccagcaaaggcatgaggtacagtgtattcactcattctcacaatgttataaaagatacccaccagtgactgggtaatttataaaagaaagttttaattgactcacagttctgcgtggctgaggaggcctcagaaaacttacaatcatggacgaaggcaaaggggaagcaggtaccttcttcacaagaaagcaggagagagagcactatcatgagaatagcatgggggaaactgcctccatgatctaatcaccttccaccaggtccttccctcaacacatggggattacaatttgagatgagatttgggtggggacacagacaaactacatcatacagcaatgttaggatgtgtcaggaaccatatgagagactgagaacagtcactgcaactggacctgtagcctggggcaaatacagaagcagtaacaagagcagtttggctctgcaatcgcaacagtagcacaagcaacacctaggggcctctggctgcccaggtagccatcaaggcaagtatatggatccaagttaacacaaactgagtttggtaccatgaggaaacagctaaagagtttgagaatgaaaaaaagtgaggtaacaggggaaagcagaagtacaaaatcttggagaagtagtggtgttgggagtgatcaacagtgtcaaatgctacagctatagcaatggattgggtattgatgtggtctgactctgtgtccccacccaaatttcaccttgaattgtaatccgaattataatcaccatgtgttgggggagggatcttgcaggaggtgattagatcatgggggtggttcctccatgctgttttcattacagtaagtaagttctcacgagatctgatggttttataaggagctttttcccccttcacttggcagttttctctcttgccatcatgggaaggacgtatttgtttccccttccaccatgattgtaagtttcctgaggcctccccagacatgtggaactgtcagacaatcaaacttctttataaatcacccagtctcaggtatttcttcatagcagcatgagaacagactaatacacgtattaacaaatggaactggcaatatatagttcattggaacattgacaaaagccatttcagtggagctatagggccaaacacctgattggtatgaacacaagagacggtcaaggaaagaactggtgcaagtatagaaaattatttctttccaagttgtgagtaaaattcttttgagtttttgtcgtaggtgagttaaaaagcatgaataagacctactatttgatagcacaacagggtgactatagtcaataactgtacattttagaataactaaaagagtgtaattggattttttgcaactcaatggataaatgcctgaggggacggataccccattcttcatgatgtgcttatttcacattgcatacctatatcaaaacattttatttctcataaataataaacacctgtgtacccacaaaaataaaaaataaaatttaaaaattcgactgacttctgtcctatctccctcaaaagtattctcttatactggtccatggaaggaagtggtaggacataactttactcaaaggggcatttttccttatattcttctaatccacaaagcattccaatataaataaatttgcattcatcataacttcacatcactctgagtgaattcacagcaattgctcattgaatcagtcactgtaggtttcctttttttttctctgtaaagggaaaaatagctctgttttacagaggactattaggaaatcattttttccatggccaatccatgaacaatgtaggccattctcgggaagacttggctttgaagaacttgggacatgcatcctgatttttataagccttctcctcttcctcctcttgtctaggaccatcctcccctccaatccattgttagtagccaggcctagcataagtgtatgcaaaaaacttttccttgatccaaaaatatataaggtgagtcagtcactcattcccagtcaccaaagaccccactcagctctagagtgttgcagactcagcatatactgtccagttaacccaggacaagcgttggtagctggaattatatacatggaacttcttagaccagatttggatcttccctttggaacctaaagtccttgagaggttcagttatgaattaataaacccagggcttctatagagcagtgtaaccgtgaacaaaatatttgcatttgcaaccaaccacacaattggctttttcctcccaaaatcaaagttaccttatacaaagtatataattacatataataattacattaatatgtgctcccatctattgagctcaacaaaaaattatacaatcaattgcctttaccatttttgaggaattcagtctttcatttattcattcatttaacacataaatggcttaccattctcagggccatgttaagcactagagttagacaactcaggaaaaacaaacatcgtcatcgtgtttgcagtgaacaggcaagatgggcactaatcaaataaccacacaaacatacataaaatgggttctctgtcggttttagtgctttatatatatttgtatttaaatcctcacaacctctctatgaggtaagtatccccacattataacgatgagaaaatggagactcagagagagaaagtgactaacttaagatcacacagttggtatgggctggagctgagatttttttaactgaggttttctgcatgggtgggtggcagtctgattagcataagaatttagagcaggagctttagatttatatacactgacgttttaaaaaaaaaattccgaaatctaaaatccactgtatatcataccctaataatctttaactgggtaaactagtagcaaagctttttagagaccatctcaggactccctttgtgtcactctcagatactacagtactgtagctatttggcctgtgaggcaaaagaaggcattatgagacatgccgagatgcctgcacactgaaagtaaagttgtagaggcatagacccccatatcccttccagctcttgaggtcaatgcagtcatgaaatggccagcaaggaaaatggtcatgcatggggatagagattaagggtgggtgggagcagtgtccaagctcagagctgttgtggataaaagacaaatatgacaacgcccaagatccctacaatgctagatcggatatctaatatccaagctttattctggtaatcctctgaatgggaattgtccagcctgagctcagggctctgtattcttttaactgtgaaggatgcctgtggtcttgaataccatcatatcagcctaaggtttctgatagaggttggagggaacctcagtgagatggacatgctggctccctgatcagaaactttgttattggggtggtaagtgaagcagacagaagggcctgaataacactcttgcttattcagcttaagatctgtggccctgataaaaaaaaaaaaaaaccttgctgtgtaaatgtacaagatatcttttcaagtgacctccttttccaaagtggctggtcaaactggatataatgaaactttttgttggctactactagataccatgataactttaaattcatgatttgctatccttgttacttgagctctatgggcaggatctgtgacttcagatatatctatctgcattggcagtggcctcctagtttctgataggcacaggaccctgagttccttggaacccatactacaacggccaatgaaatacaatccagcaggggaaacaaccattccaactagagctgcttgcacaggattcacagctcccaccctgccttcttgcctccaaattcctcattctctcttgtctgaattcattaaaattacacacaaaaatgaccacaatcattaaattcccatttgtctggatggccatagaaatagacactgtaccttctaacagctctatcatcacttcttttaaattcgagtggttttccactaggaatatccctatttcaattcttcaagaaacttacaaatattttagaactgagcaggccaagggatatgatagtgctgaagtgagacatccttcagtttctgggtaaacttccttctagaagtttggaagcagctttggaaaaagcaccacaataaacacagctctcctctctgagctgcatccttagagaaagtcttcgaccatgtgttatagagaattacaccttgtccccagtctctctgacatccatctttatctcattccattctagtttatcaactgcgtgttatccccacaggcctcagacattcagatggctcagtcccctaccttcctgaggatccactgtcaagaattttttgctcctgcatctaccctacccatttattctacaatatgtattgagcacctactgtatgatagacattgaacttggagctgggaatatatcagtgcacaaaatagccctgcatccctggactcatggagctgacatcctagcagatcatcaactgtgaaagtggactactagtccacccttatcattggtacctgagaaactagcactatccagaaattatagtgagcaacttccctaggcttggcaatgccaaactttctgtaatgcacgatcagaaatgcataaagaatcaagaggaaactaccactccttaatctgtaaataactgcaaataaatttggcatgtacactgttgccatacatgtttccctaccacccaccaccctttttctgattcttgttatatgagctggttaaaattaaatttgggaaaagaaggccagtattaaggtgaatatagtttactatagctcttccttaggcttataaatcaaatgagaaagaaaaatccaggggaggggagggaaggagagaggtgcctgtacaggtagatacacacacacattctctcggtttggttaagccctctggataagaagatattacagcatatatgagtttgagatagttcagctctaatcagagcaatgagaagattatcaaggtgatacttgaataaggcttacaacacttttagtctccaaaaactgtaacacagctgaatcactcaaaaacctcaaaaattaactctccgcaaccactcctcccctaccccaaatctcagggtcatgtgtcagggtccttctgctattctagaaagcatcaatcctcttctgctggaagtgctttaggaggctctgacggatctgcctagacttgatgcaatacacaatggggttcatgaagggtgggaccaagaagtgtaggttggccatgagcactgccagagcagggtagtcatgcttctttactcggtgcaagacagacagcccgtttgggcaaataaaagatgagaacaatgcagaggtgtgagacacacgtgttgagtgccttgagccgctccccaggtgatgcaatgcccagcacagttcataggatcagggcatatgaaagcatgatgaggaaggagtcaaggcacagtgagaagaggatggaaaccaggccaaccaggctattgatctgggtgtctgagcaggccaaccccacaaggtcacagtgcaggcagtagcagtgacagagagcgctgatcttgggaaagagcagctgctgcaggaggataggtcccgggaggttgagcagaacagccctcaccagaatggcagttcccacctcggctgtgactgagcaggtaatgattatggcataatgcagagggtcccggatggcaataaagcgatcgaaggccatggccagcagtacaccggactccacataggtgaaggtatggatgaagaacatctgtgctgcacagagatcaaagggcagctcacgagctcccagccagaagagacgcaccatagtggggaaggtagaggcacagaggcccagatcagaggctgccaacatggacaggaagatatacatgggttcatgtaaggctggatctgtgtggatcaggaagaggatgatattattacccaggatggaaaccacacagaagaggttgatggggatggaaacccaatgatgagaggcttccaggcctggaaaaccagtgaggaggaaggtagactgaccagaagtgctggtgttgcaggagaacatagagattccaggcagtagttgtccaccctaggagtaagaagcattgttcatttgatcattacttataaagtccctagtaagtgtgggcttgagaaagaagagctacctcataaccctttcttaggctatgaaacaaactccattcattttaggagctctatttccttctgtttcctgagcttttgggcttgaataaaatgatatagcactttattctatttttattcaaaaagagaaagtttctgagttgatctctgcttactgcttatggctatttcattagccactattttccctttggcctaaacaatctttttttttcatttgttaaacctaaaagtctcccactccagagtgtcttctcagactaaaaactgaagaaaggagaataattttatgtagaaatttaaaattatattagaaacaagtttaaaatccacttctacttattcttagaggtgagttttccagtctgacagatctgttaacaaatacaccataaaagccaaactcaaacaaatgaggtattttcaaaaccatcctcttagaaggctggttgcatattcctctagtgcggtcatagaaccaatattttctgtatttcttttctagaaatgcctttggggcccaaaacaggttctttaaatgtgcttaatgatgaaatttatttcctatgaagatgaactggcttaaaggaagtagtcaatagttcttgatattaagaactggtaaacaagatagtagtttaccagacacattcaattttgttaatctgcttctttaccaactctactttcactttataagctgcttaaagcttgcatgttttattctggccctaccttcaaaacagtcctgtggccataaactcaattagaaggaactttcctcttaaatatctcttcttcagccctcctactatgaaacttgttatgatagggccaagtactctgaagtactcccacattgggggcagaaggtggaggctgacatatcttgaggcgcatcccctgaagggtcaggcagagcatcataaacttccagaaccccagggttaatcatgttattccatggaggtcaaagtgcagtgtgtgagctcatctgttctaataaactcacatagcactttcaggctacactttctttccaacttctctccttaaaacaggactacatctccatttatctcctaagcatctcacatggtgactctgcaagatattaaatctatattgcaaaccaaactctaattcccccacatctccccaaagctcaccattcagcacttgttggctagtgcctcccttcctttcctgttatctgtgaaataccaaaaaactaagacaactttgtatatccttttacttgtaacatattctccaaatcgactatctttaaactattccttccttttagatcccagtgaaactaatctggctgaataatcaccattttcctggatattatagcagcttaactgtctcactttcttctgtctttctgcattctgacaaaagtccaaatttccatacttgtcatttcataaatatttctaagttgtcagcaaaatatttatgaaatgacaaatatggacatttaagctagtatatgtatacagagaaaaaatggtgatcaaatttatattaggaagatgttttctatcataactgtgtttatgatcactggtagtttcctgatacctgcaggatcagatctaagcaagagctttatactaaatccagaagaggaaaggccttgtccattcggcatgtctagtcttttcaatcacctcttccctaagtattaggaactctattcttaagacatcttttgactcaccaaattcaccatatttgaccatttcaaaaatatttttatttaaatgtagcatacacatagaaaagtatgcataccataaatgtaaatcttaatgaatttccacaaagtgaatacacccatgtgataaacacccagatctataaacaggatattgtcatcccccccccccaaaaaaaacccatgaattctttcagtcaatctatcccctcagtgataatcactatttaatcccacagattaactttgcctatttttgaactttctataattagaaccatagagtaggtactcatttgtcattcactaaactttgtctgtgagattcatccatattgcttcatatagctataatgtattcattcccattgctgcataatttttccttggatgaatataccactatatatttatccattctatcattaatagatatttaggtcatttcaagtgtggaactattataaatagtgttgctgtgaacactcaaatatatatcttttatgaatgcgtttgcagttctgttgagtattacctaggaatgaaattgatttatcataagctatgcatacattcagctttcacatattcttccaaacagctttcaaaagtgatttaccaatttatacccacaccaacactgtaggagagtttgattattccacatcctcatcaatactttggttggtctttttaattacagctattctatgggtgtgtaatggtattttcttgtggttttaacgtatatttccttgatttctaataaagtaagcagctttccatatgtttactatttgaatatattcttttaggaagttttcagtcttttactcatttttctattgggtcgcctgcatttttcatattgcttgtatgtgttctctattctgaataaccactgtacattttatgtgtttaagtggctgggccactttctaattgccattttatgaaagttatataaccttgacaggtttctatttcctgagtctgttttcaatagctttgtgcatgaaccagcttaatcctgtagttacaggcctcacataatgcctaacacttagtgtattcatcacagtattagttcgcttcacttttatattcagtgaaagtctaagactccttcagggcacttgtttataaaggaaagataagccattggacaatatcaaaattccatcattccctcttctgcacctgtccttcagacatgtcttctgagtaaactgtggggatacaactggctaaggaagtgttcctagagggagtcatttacctgtcggcatcctccagtgtccccaagctgggttcagtgcatgtctccatcaaacacaagtcacaccacagtctaattattatacattggagcaattatcaaggtcagggcattgtgtaatactgctgctttctgttagttatgatgattattaacgttgttaatgctgaaaatatccatccctaagcaagatgaaataggaagaagtatttacaagatgttctcctataccactcctgcctcctccctgaccacttacatgcatctgtccttgagggtccccagagaaaagtcctaagactgtaacgggcccatgtgcttattgaccgtccctgtgttgcatactgtgtgagtttaattaaagactcatagcttaggaagaaaaaattctcctcaaagctgtaatctcctgagagaacaatagaaaaacatgataaactgtggaaagaaaaaacaatggagatagatggagatagaggatacatggatgatgaatagattgatagatggatcaatagatagattgatggatggataggtagatggatggtagctaagtagttgcatgataggtaggtgggtgataggtagatagatagactaaacagacccctctaaggagatggaataaaattaaactacagtctctgcccctgtaccatcttactcatccagtttccaaaagaccatgaatagtgcaaagactatttctttctctaatcaggtgaaatctatccccaagagccaagataggagtcactacaaggagatgacccagattagagaaggttggggaccctcctccaccaagaagctttctatggcaaccagtactcaagggaatgtgaggcttttaagcctctggccttgccagctgagtcctggggccaagaagaaagttacagaaaaatgggccctagaactgcatccctagcctagctaagactgtcaggagctgggagcccacattttccccaagcccatgacgctgttgtgcgttagccaaaattaggtctaatcctgctctgctcagaaataagcttagcataaacctgcccaggccaagtacctgtatccaggaagtcacaagctctccacagggtccccagctccctccagaacaactcagaccccctccacccatgttgcttcaaacagacagctttatgtcatagggatgaacgcaggatgtgtggggaaggttccttttctccacagctccttcctccccacaccatttaaaaactgagaaatactaaggagttgccattgggttttaacacaggacttggatcctgaaagctatcaatgaaatcgcagtgagatctgactaaaataaaactggagcttctccaagggttttagtttatgtatagaattaagatccatatagaaaaaaaatcattattaaataaatctgaacctattttgttaaattctgtgctttaatctctttaaatatttttaaacagtagatcctctttaaatctgaccatagaaatattgtctcactttcatagttggcaaccaaaatccttgattaaatttaactggtgaagccagggtctggagtggatcaggaatatctctagtattgaaagacattaaattttaagtgacagatgggtggatggatggatagatagatagataaatagactcagcctcgtacagaggcctttgtatgtaaatcactggctcctgtgaatttttgtaacctggccttctgtcatcttccctccagagtacagatactgctaatctatctattagctgctgagatatttgcaaatgtaatctctctttaacttccttgaatatttttaatagcacaaataatgtgtagtttattaaaagcatgcatctcatattggcatttcaaaggttgggacaggttggtatattttatatattttatcctaggtaggcagcacagggttagaagtgtgtgctctagacccaaactgtctgagtttaaatcctggctttactacttattaattgtaagacggtgggcaaatttattaactcttctatgtcctgtgttcttgtcctgagggaaataagagaacttctgtcattgagtggcggtgaggttaaaggagctcatgaagaaatcctaagacctgaataagtggtaacaatgatcagctattacatagctgacagccttctgacttgagttagcctaggataagatggagggtggctcccctctgtccctcctcaaactagtcagaatatgtcatcgaaggggaggtttcatcaaagcagctagacccaaggttgaggcagagtccatactgtaggcctgtttctgtcccacaagcagaagtcccacagtaggattcaggacacctatcaaattcagcctatgctacgagcagccaccgcagatgaacctggaggaccatagatacattgtttttctcatatttgaccagttggttgaggattgaagaggaacatcgttgcctttaatcatgagatgaccatgttcctggatcatcaaggaatagtccagcccaaaaaaggtaatgttgtgataacagtccatcacaaatacccacccaaactcattattttataagaaggaggatcagtaaaggccttaagtaactctctcttctcaggttatggaaggacccgaagctgcccaccctaaacagattccattcaggccagtggtccaaggcctcagagctcaggctccccagcccagaccccagatttgacactctagcccctgaacttaccacacctccagagcttgtatctcctctcatctgtttctctgtgaaagtaattcttgctgtgtcagtaaaagtcaacactttataatcctcttgatggaggtagggaaataacaggtctgctgggatccaggtgcaaatccaagagatttccacaatttaacttcctgaaccccctgagttctgagccaggcagctctgggacatggaaggatgcatcaggcagtgtatcctaatgattcacacctgaggatttttcttagagggcaccagaaggatattaagatgtcccatggctggaggcagtggctcacacctgtaatcccagcactttgggaggctgaggcgggcagatcacaatgtcaggatatcgaggccatgctggctaacacagtgaaaccccgtctctactaaaaatagaaaaaattagccaggcgtggtggcaggtgcctgtagtcccagctacttgggaggctgaggcaggagaatggcgtgaacccgggaggcagagcttgcagtgagccaagattgtgccactgcactccagcctgggtgacagagcgagactctgtctcaaaaaaaaaaaaaaaaaaaaaaaaaaagatgtcccatactgcgtacctcctctttccaaagagccaggctatgaattgcctggtggcaaatggaggctagttgggggaaagaggatggttagagactgagacacactctgtcctttagggataacagaggccatgagtaattcctgcttctagaaagaatgaacacaggctcttttcaaattctgccaaagagatatcaggcagtgtagccaaagagatgtgcatgagtgctttaaacacaagagcaagttagcgaagagaaaagagcttctctgtctaactttatgcctgtacctagagaatgtaggtgactgaaaatctatattgataaagcaatatccctttctcccagtaacacctttggagattatttatcaagcataatatagtgaaaaagccacgatctatttcagaatctgtcacttgtcaactgtgagcaaattatctccttgagcctcttattctttattcataaactagggatgatggttatttcatgagatcattgttagtattatattagaatatacaaagggtgcaaaaaaaaaaaaaagcttgcaagctccacacataacttcctctccaataggaaactgagaactggttcaataacctgtctggattcctctatggccagcatgtcatactaaccctcccccacaattcatggtcagagcttgtttttgttttttttttaataagttttattctggaataattttagatttacaaaaaagttacaaatatagtttacggagtttctgaatgtccttcacccattttccttaatgttaacatcttacagaaccatagtacattagtcaaaaccaaaggactaatattggtacatcgctattaactaaagtccacactttatttggatttcacctgcttttccaatgtctttcttctgttccaggatccaatccaggatatcaaattgcatttactcattatttctccttagtgtcctctggtctgagatggaagtttctcagtttttccaaggtttccatgaccttgagagtcttgaagaacactggctaggtattttacagaagatcagagcatttaattaaccaacttcagctatcacttcctcctccatttctaggatggagaggacaatctagagttgaaaggctttgctacagatgtcctttgtttcactgcaggtcccagtgtgtcctggagattagggaagagaaaatttcaaagttcagtctgctcaagtcccttagttcctgagatcatccaagttgtccttccaacctggagaccaatctcagacctccgtgggctgcaacccaatacaggcattctcgtatctgtcacacatcctatgttcatgcattgaaatttaagtcagaaatttcacaggttcttaacaagtttcagtctctaaagttaataagaaatttttaaaggatttgtatgtgtattttgctgaaatacttcagaagtatttaacttctctctgatgaaatattttctttagcttctctacagcctgtctctagaatccttcatttgccttaaaactaataaatgtggccacagtcagattgtctgtcacatctgggatatgagagaaaatgataaatggaagtagacaggtgaaacacaagatcaattctatctgctcgtatggagactactgccattcacccacttcagccatcccctcgtcctcaatctccaacatagagagggtagcctacaggtgaaaggctcagttacagatgtcctggaactctgcagttctctctgtttcactgcagtcccagtgtgttttcttcattctaaaatctacattttcaatagtcttttcagtggttcacaaaattggggtttctttatgcactgtgctttacttagaggttaaccaggtaccaattctgttctcaagcagctatgaccctaaaacacagtaaaccatatgtgaaaactgaattgctacattacactacaccctagccaataacagagaaataagactttgtgtaagagaggatggtattggagactttgaggatgtgttagccttaaatatatagacataaaagtcttgccagcattgtagttaactggatatgaaatcagacagaactaaaactccttattagccaagtggccccagaatagatactgagcctctaaaagtatcagtttccactctataaaattgagatactaaaacaatctggagcggtttaagtgacatgttatatacaaaacagtgggccttatttttcactgtttcagcatcttttttattatactttattttaagttctgggatacatgtgtagaccatgcaggtttgttacataggtatacatatgccatggtggtttgctgcacccatcaacccatcatctacattaggtttttctcctaatgctatccctcccctagcccctcacccccagacaggcccctgtattgatgtttccctccctgttgccatgtgttctccttgttcaactcccactgatgagtgagaacatgtggtgtttggttttctgttcctgtgttagtttgccgagaatgatggtttccagcttcatccatgtccctgcaaagaacatgaactcatccttttttatggctgcatagtattcctcggtgtatatgtgccacattttctttctccagtctattactgatgggcatttgggttggttccaagtctttgctattgtgaatagtgccacaataaacatatgtgtgcatgtgtctttatagtagaatgatttataatcctttgagtatatacccagtaatgggattgctgggtcaaatggtatttctggttctagatccttgaggaatcaccacactgtcttccactaatttacactcccaccaacagtgtaaaagcgttcctgtttctccacatcctctccagcatctgttgtttcctgactttttaatgatcagcattctaagtgagatggtatctcactggggttttgatttgcattcctctaatgaccagtgatgatgagctttttttcatatgtttgttggccacataaatgtcttcttttgagacatttatatccttctgtctgttcatatcctttgccaactttttaatggggttgttttttcttacaaatttaagttccttgcatattctggatattagccctttgtcagatggatagattaaaaaaattttctcccattctgtaggttgcctgttcactctgatgattgatagtttcctttgctgtgcagaagctctttagtttaattaaatcacatttgtcaattttggcttttgttgccattgctttggtgttttattcatgaagtctttgcccatacctatgtcctgagtggtattgcctaggttttcttttagggtttttaatgtttttaggtcttacctttaagtctttcctttatcttgagttaatttttgtaaaaggtgtaaggaagggatccagtttcagttttctacatatggctagccagttttcccaacaccatttattaaatagggaatcctttccccttccccattgcttgtttttgtcaggtttgtcaaagagcagatggttgtagatgtgtgggattatttctgagggctctgttctgttccattggtctatatctctgttttggtaccagtaccatgctgttttggttacggtagccttgtagtacagtttgaagtcaggtaccatgaggcctccagctttgttctttttgcttaagattgtcttggttatacagggtcattttggttgcatatgaactttagttatttctaattctatgaagaaagtcaagggtagcttgatgggaatagcactgaatctgtaaattacttcgggcagtatggccattttcacaatactgattcttcctacccatgagcatggaatatttgtccatttgtttgtgtcctctcttattttcttgagcagtggtttgtagttctccttgaagaggtccttcacatcccttgtaagttggattcctaggtattttatcctctttgtagcaattgtaaatgggagttcactcatgatttggctctctgtttgtctgttcttggtgtataggaatgcttgtgatttttgcacattgcttttatatcctgagactttgctgaagttgcttatcagcttaaggagattttgggcagagacgatggggttttctaaatatccaatcatgtcatctgcaaacagagacaatttgacttcctcttttcctaattgaataccctttatttctttctcttgtctgattgccctggccagaacttccaatactatgttgaataagagtggtgagggcatccttgtcttgtaccagttttcaaagggtatgtttccagcttttgcccattcagtattatattggctgtgggtttgtcataaatagctttcattattttgagatacgttccatcaatacctaacttattaagagtttttagcataaagggtgttaaattttatcataggccttttctgcatctattgagataatcatgtggttttgtcgttggttctgaaagagatacagacgcaaaaaacccttcaaaaaatcaatgcatacaggatctgttttttaaaaataacaaaatagttagactgctagccagagtaataaagaaatgagaggggggtggagccaagatggccaaataggaacagctccagtctacagctcccagcatgagtgacgcagaagacgggtgatttctgcattttcaactgaggtaccaggttcatgtcaccagggagtgtcggaaagtgggtgcaggacagtgggtacagtgcacccagcatgagctgaaccagggcaaggcatagccttacccaggaagcccaaggggtcagggaattccctttcctagttgaagaaaggggtgacagacggcacctggaaaatcgggtcactcccactctaatactgtgcttttccaatggtcttagcaaatggcataccaggagattatatcccgtgcctggcttggagggtcctatgcccacggagcctcactcattgctagcacagcagtctgagatcaaactgcaaggtggcagtgaggctgggggaggggcgcccgccattgccgaggcttgagtaggtaaacaaagccgccaggaagctcaatctgggtggagcccactgcagctcaaggaggcctgcctgcctttgtagactccacctctgggggcaggacattgccaaacacaaggcagtagaatcctctgcagacttaaatgtccctgtctgacagctttgaagagagtagtggttctcccagcatgcagctggagatctgagaatggacagactgcctcctcaagttgggtccctgacccccaagtagcctaactgggaggcaccccccagtaggggcggactgacacctcacatggctgggtactcctctgagacaaaacttccagaggaacgatcaggcagcaacatttgctgttcaccaatatctgctgttctgcagccaccgctggtgatacccaggcaaacacggtctgtagtggacctccagcaaactccaacagacctgcagctgagggtcctgactgctagaaggaaaactaacaaacagaaaggacatccacaccaaaatcccatctgtacatcaccatcatcaaagaccaaaggtagataaaaccacaaagatggggaaaaacagagcagaaaaactggaaactctaaaaatcagagtgcctctcctcctccaaaggaacacagctcctcatcagcaatggaacaaagctggatggagaatgactttcatgagttgagacaagaagccttcagactatcaaactactccaagctaaaggaggaagttcaaacccatggcaaagaagttaaaaaccttaaaaaaattagacgaatggctaattagaataaacaatgcagataagcccttaaaggacctgaaggagctgaaaaccaaggcatgagaactacatgacgaatgcacaagcctcagtagctgattcgatcaactggaagaaagggtatcagtgatggaagatcaaatgaatgatatgaagcgagaagtttagagaaaaaagaataaaaagaaataaacaaagcctccaagaaatatgggactacgtgaaaagaccaaatgtacgtctgactggtgtacctgaaagtgacagggagaatggaaccaagttggaaaacactctgcaggatattatctaggagaacttccccaatctagcaaggcagcccaacattcaaattcaggaaatacagagaatgccataaagatactcctcgagaacagcaactccaagacacataattgtcagattcaccaaagttgaaatgaaggaaaaaatgttaaggacagccagagagaaaagccaggttacccacaaagggaagcccatcagactaacagctgatctctcagcagaaactctacaagccagaagagagtgggggccaatattcaacattcttaaagaaaagaattttcaacccagaatttcatatccagccaaactaagcttcataagtgaaggagaaataaaatactttacagacaagcaaatgctgagagatttttgtcaccaccggactgctctaaaagagctcctgaaggaagcactaaacatggaaaggaacaaccagtaccagccactgcaaaaacatgccaaattgtaaagaccatcaaggctagaaagaaactgcatcaactaatgagcaaaataaccagctaacatcataatgacaggatcaaattcacacatgacaatattaaccttaaatgtaaatgggctaagtgcttcaattaaaagacacagactggaaaattggataaacagtgaagacctatcagtgtgctctattcaagaaacccatctcatgtgcagagacacacataggctcaaaataaagggatggaggaagatctaccaagcaaacggaaaacaaaaaaaggcaggagttgcaatctaagtctgataaaacagactttaacccaacaaaaatcaaaagagacaaagaagataatggtaaagggatcaattcaacaagaagagttaactatcctaaatatatatgcacccaatacaggaggacccagattcataaagcaagtccttagagacctacaaagagacttagactcccacacaataataatggcagactttaacaccccactgtcaacattagacagatcaacgagacagaaagttaacaaggatgttcaggaattgaactcagctctgcaccaagtggacctaatagacatctacagaactctccaccccaaatcaacagaatatatattcttctcagcaccacactgcacttattccaaaattgaccacatagttggaagtaaagcactcctcagcaaatgtaaaagaacagaaattataacaaactgtctctcagaccacagtgcaatcaaactagaattcagggctaagaaactcactcaaaactgctcaactacgtggaaactgaacaacctgctccacaatgactactgtacataacgaaatgaaggcagaaataaagatgttctttgaaaccagtgagaacaaagacacaacataccagaatctctgggacacattcaaagcagtgtgtagacggaaatttatagcactaaatgcccacaagagaaagcaggaaagatctaaaattgacaccctaacatcacaattaaaagaactagagaagcaagagcaaacacattcaaaagctagcagaaggcaagaaataactaagatcagagcagaactgaagcaaatagagacacaaaaaaacccttcaaaaaatcaatgaatccaggagctggttttttgaaaagatcaacacaattgatagactgctagcaagactaataaagaaaaaaagagagaagaatcaaatagcagcaataaaaaatgataaaggggatatcaacaccgatcccacagaaatacaaactaccattagagaaaaccataaacacctctatgcaaataaactagaaaacctagaagaaatggataattccttgacacatacaccctcccaagactaaaccaggaagacgttcaatctctgaatataccaataacaggctctgaaattaaggcaataattaatagcttaccaaccaaaaaaagtccaagaccagatggattcacagccaaattctaccagaggtacaaggaggagctggtaccattccttctgaaactattccaatcaatagaaaaagagagaatcctccctaactcatttgatgaggccagcatcatcgtgctaccaaagcctggcagagacacaacaaaaaaaaagagaattttagaccaatatccctgatgaacatcgatgcacaaatcctcaataaaacactggcaaaccgaatccagcagcacatcaaaaagcttatccaccatgatcaagtgggcttcatccctgggatgcaaggctggttcaacatacacaaatcaataaatgcaatccagcatataaacagaaccaaagacaaaaaccacatgattatctcaatagatgcagaaaaggcctttgacaaaattcaacaactcttcatgctaaaaactctcaatcaattaggtattgatgggacgtatctcaaaataataagagctatctatgacaaacccacagccaatatcatactgaatgggcaaaaactggaatcattccctttgaaaactggcacaagacagggatgccctctctcaccactcctattcaacatagtgttggaagttctggccagggcaatcaggcagaagaaggaaagagtattcaagcaggaaaagaggaagtcaaattgtccctgtttgcagatgacatgattgtatatctagaaaaccccatcatctcagcccaaaatctccttaagctgataagcaacttcagcaaagtctcaggatacaaaatcaatgtgcaaaaatcacaagcattcttatacaccaataacagacaaacagccaaatcatgagtgaattcccattcacaattgcttcaaagagaataaaatacctaggaatccaacttacaagggatgtgaaggacctcttcaagtagacctacaaaccactgctcaaggaaatgaaagcggatgctgtacaaatggaagaacgttccatgctcatgggtagaaagaatcaatatcgtgaaaatggccttactgctccaaggtaatttatacattcaaagccatccccatcaagttaccaatgactttcttcacagaattgtaaataactactttaaagttcatatggaaccaaaaaagagcccccatcagcaaggcaatcctaagccaaaagaccaaagctggaggcatcatggtacctgacttcagactatactacaaggcaacagtaaccaaaacagcatggtactggtaccaccacacagatatagaccaatggaacagaacagagccctcagaaataacgccacatatctacaactatctgatctttgacaaaactgataaaaacaagcaatggggaaaggattccctatttaataaatggtgttgggaaaactggctagccatatgtagaaagctgaagctggatcccttccttacaccttatacaaaaattaattcaagatggattaaagacttaaatgttagacccaaaaccataaaaaccctagaagaaaacctaggcaataccattcaggacataggcaggggcaaggacttcatgtctaaaacaccaaaagcaatggcaacgaaagcaaaaattgacaaatgggatctaattaaactaaagacagtctgcacagcaaaagaaactaccatcagagtgaacaggcaacctacagaatgggagaaaatgtttgcaatctactcatctgacaaagggctaatatccacaatctacaatgaactccagcaactttacaagaaaaaaacccatcaaaaagtgggcgaaggatatgaacagacacttctcaaaagaagacctttatacagccaaaagacacatggaaaaatgctcatcatcactggccatcagagaaatgcaaatcaaaaccacaatgagataccatctcacaccagttagaatggcaatcattaaaaagtcaggaaacaacaggtgctggagaggatgtggaggaataggaacacttttacactgttggtgggactgtaaactagttcaaccattgtggaagtcagtgtggcaattcctcagggatgtagaactagaaataccatttgacccagccatcccattactgggtatatacccaaaggattataaatcatgctgctataaagacacatgcacacgtacgtttattgtggcactattcacaatagcaaagacttggaaccaacccaaatgtccaacaatgatagactggattaagaaaatgtggcacatatacaccatggaatactatgcagccataaaaaaggatgagttcatgtgctttgtagggacatggatgaagctggcaatcatcattctcagcaaactatcgcaaggacaaaaaaccaaacaccgcatattctcactcataggtgggaattgaacaataagaacgtttggacacaggaaggggaacatcacacactgaggcctgttgtggggtgggggggaggggggagggatagcatttggagatatacctaatgttaaatgacgagttactgggtgcagcacacaaacatggcacatgtatacatatgtaactaacctgcatgttgtgcatatgtaacctaaaattaaagtataatttaaaaaatgagagaagaattaaatagatacaataaaaaataataaaggggatatcagcgctgatcccacagaaatacaaactaccatcagagaatattaatgtgtgatgggttatgtttactgatttgtgtatgttgaaccaaccttgcatcccagggatgcagccaacttgatcatggtggataagctttttgatgtgctgctggatttggtttataagtattttactaaggattttctcattgatgttcatcagggtattggcctgaaattttttttttgttgtttctctgccaggttttggtatcaggatgatgctggcctcacaaaatgagttagggaggagttcccctttttctaatgtttgggatagtttcagaagaatgataccagctcctctttgtacctctggtgtaattcagctgtgactccatctggtcctgggctttttttggttggtaggctactaattactgcctcaatttcagaacttgttattggtctattcagggattcgacttcttcctggtttagtcttgggatggtgtatgtgtccaggaatttatccatttcttgtagattttttagtttatttgcatagcggtgtttacaatattctctgatagtactttgtatttctgtgggatcagtggtgatagccccttaatcattttttattgcatctgtttgattcttctctcttttcttctttattagtctggctagcagtttatctattttgttaatcttttcaagaaaaccagctcctggactcactgattttttttgaagggtttttcatgtctctatctccttcagttcttctctgatcttagttatttcttgcctctgctagcttttgaatttgtttgctcttgcttctctagttattttcaatgtgatgttaaggtgtcaattttagatcttttctgctttctcctgtgggcattttagtgctataaatttgcctcaaacactgctttagctgtgtcccagagattctggtactttgtgtctttgttcacattggtttcaaagaacttatttatttctgacttaatttcattatttacccagtattcattcaggagcagtttgttcagtgtccatgtagttgggtggttttgagtgagtttcttaatcctgagtactaatttgactgcactgtggtctgagagactgttatgatttccatgcttttgcatttcctgaggagtgttttacttccaattatgtggtaaattttagaatagtacaatcaatgtggtgcagggaagaatgtatattctctgatttggggtggagagttctgtagatgtctattaggtctgcttggtccagagctgagtacaagtcctgaatatccttgttgatttcctgtctccttgatctgtctaatattgacagtggggtgttaaagtctcccactatcattgtgtgggagtctaagtctttttgtaagtctctaagaacttgctttatgaatctgggtgctcctgtattgggtgcatatatattaatgatagctctttttgttgcattgatgcctttaccattatgtaatgcccttctttttcttttttgttctttgttggtttaaagtctgttttgtcagagactaggattgcaccctctgctttttttttttttgctttctatttccttggtaaatattcctccatccctttattttgagcctatgtgtgtcgtcgcacatgagatgggtctcctgaatacagcacaccaatggttcttgactctttatccaatttgtcagtctgtgtcttttaattggggcatttagcctgtttacattgaaggttaatattgatctgtgtgaatttgatcccgtcattatgatgctagctgggtattttgcctgttagttgaggcagtttcttcatagtgtcaatggtctttacaatttggtatatttttgcagtggctggtaccagcttttccttttcatatttagagcttccttcaggagctcttgtaaggcaggcctggtggtgacaaaaatctctcagcatttgcttgtctataaaggtttgtatttcttctttgcttctgaagcttagtttggctggatatgaaattctgggctgaaaattcttttctttaagaatgttgatattggcacccactctcttctggcttgtagggtttctgcagagagatccgctgttagtctgttgggcttccctgtgtggacagacacttctctctggctgcccttaacattttttccttcatttcaaccttggtgaatctgactattgtgtcttaagattgctcttcttgatgagtatctttgtggtgttctctgtatttcccaaatttgaatgttggcctgtcttgctaggttggggaagttctcctggacagtatcatgaagactgttttccaacttggttccattctccctgtcactttcaggtacaccaatcaaatggaggtttggtcttttcacatagtccatatttcttggaggttttgcttgttccttttcattcttttttctctaatcttgtcttgatgctttatttcattaagttgatcttcaatctctgatatcctttcttcctcttgatcaattcggctattgattcttgtgtatgcttcatgaagttctcatgctatgtttttcaactccatcaggtcatttatcttcttctctaaactgatgattctagttagcaattcctctaaccttttttcaagtttcttagcttccttgcattgggttagaacatgctcctttagcacagaggagtttcttattacccaccttctgaagcctacttctgtcaattcatcaaactcattttccatccagttttgttcccttgctggcaaggagttgtgattctttgcaggagaagaggtgtgctgttttttggaattttcagcctttttgcactggtttttcctcatcttcatggatttatctacctttggtctttgatattggtgacctctggatggggtttttgtgtggacattctttttgttgaggttgacgctattgctttctgtttgttagttttccttctaacaggtccctctgctacaggtctgctggaggtccactccagaccctgtttgcctgggtatcaccagcagaggctgcagaacagcaaagattgctgcctgttccttcctctggaagctttgtcccagaggggcacccgccagatgccaaccagagctctcctgtatgaggtgtctgttgacccctcctgggaagtgtctcccagtctggaggcacaggggtcagggacccacttgaggaggcagtctgtgccttatcagagctcaagcactgtcctgggagatccactgctctcttcagagctggcaagcaagaatgtttaaggctgttgaagctgtgctcaccgccaccccttcccccagatgctctgtcccagggagatgggagttttagctataagcccctgactggggctgctgcctttctttcaagatgtcatgcccagagaggaggaatctagagaggcagtctggctacagcaggtttgcgaagctttggtgggctccacccaattcgaacttcccagcagttttgtttacactgtgaggggaaaaccgcctactcaagcctcagtaatggtggatgcccctcactccaccaagctcaagcatctcaggtcaatttcagattgctgcactggcagcaagaatttcaaacccgtggatcttagcttgctgggctccatgggggtgggatccactgagctagaccacttggctccctggcttcagccccctttccaagggagtgaacagttctgtcttgctggtgttccagacgccactggggcatgaaaaatcctgccgctagctcagtgtctgcccaaacagccacccagttttgtgcttcaaacccagggtcctggtggtgtaggcatccaagggaatctcctggtccgtgggttgcatagaccatgggaaaagcatagtatctgggctggatagcaccattccatcaggtcctttaaggacttctctgcattggttattctgacctaaaaccacaaaaaccctagaagaaaacctaggcaataccattcaggacataggcatgggcaaggactacatgtcttaaacaccaaaagcaatggcaacaaaagacaaaattgacaaatgggatctaattaaagagcttctgcacagcaaaagaaactaccatcagagtgaatgggcaacctatagaataggagaaaaattttgcaatttactcatctgacaaagggctaatatccagaatctacaaagatctcaaacaaatttacaagaaaaaaacaaccccatcaaaaagtgggcaaaggatatgaacagacacttctcaaaagaagatatttatgcagccaacagacacatggaaaaatgctcatcatcactggccatcagagaaatgcaaatcaaaaccacaatgagatactatctcacagcagttagaatggcgatcattaaaaagtcaggaaacaatgggtgatagacaggatatggagaaacaggagcacttttacactgttggtgggactgtcaacgagttcatccattgtggaagacagtatggtgattcctcaaggatctagaactagaaataccatttgacccagccatcccattactgggtatatatccaaaagattataaatcatactgatataaagacacatgcacacatatgtttattgtggcactattcacaatagcaaagacttggaaccaacccaaatgtccaacaatgatagactggatgaagaaaatgtggcacatatacaccatggaatgctatgcagccataaaaaaggatgagctcatgtcctttgtagggacatggatgaaagtggaaaccatcattctcagaaaactattgcaaggacaagaaaaccaaacaccgcatgttctcactcataggtgggaattgaacaatgagaacacatggacacaggaaggggaacatcacacactgaggcctgtcctggggtggggggaggggggagggatagcatcaggagatatatccaatgtaaatgagttaatgggtgcagcacaccaacatggcacgtgtatacatatgtaacaaacctgcatgttgtgcacatgtaccctagaacttaaagtataatttaaaaaaaaatctaaggcctcaaactatgaaactactacaagaaaatattggggaaactctccaggacattggactgggcaaaaatttctttcaaatattccataagcacaggcaaccaaagcaaaactggacaaatgagatcacatcaagttaaaaagcttctgcacagcaaaggaaacaatgaagtagagagataacccacagaattggagtaaatatttgcaaactatccatctgacaagggattaataaccagaatatacaaagaactcaaacaactctataggaaaaaaatataataatctgattcaaaaatggacaaacgatctgaatagacattcctcagaagaagacatacaagtggcaaatggatatatgaaaatgtgttcaacaccactgatcatcagagaaatgcaaatcaaaactacgagatattatctcacctcagttaaaatgtcttttaaccaaaagaaaggcaataacaaatgctggcaaggatatgtagaaaagggaaccctcatacactgtcaatgggaatggaaattagtacaaacactatggcaaacaatttgaaggttcctcaaaaaaaaaaaaaaacctgaaaatagagctaccatgtaatctagcaatcctactggatactgctaggtatatacccagaagaaatactgttaggtatatatccaagagaaaggaaatcagtatatcaaagagatatctgcactcccatgtttatcgcagcactattcacaatagccaagatttggaagcaacgtaagtgtccatcaacagataaatggataaggaaagtgtggtacacatacacaatggagcactattcagccataaaaagaaggagaacctttcatttgctacaagatggatggaattggggattattatgttaagtaaaataaaccaaacacaggcaaacaaacaaattgttatgttctcacttatttgtgggagttaaaaattaaaacaatccaactcatgaagatagagaggatgatggttaccaaaggctgggaagggtagtggggaatgattaatgggttcaaaaatacatgagagagaatgaataagatctagtattttatagcataacaaggtgaatacagtcaatgataatttatcattttaaaataactaaaagcatataactggattgtatataacacaaatgataagtgcttgaggtgatggatagataccccacttaccctgatatgattattacggattgtatgctctacctgtatcaaaatatttcatgtaccccacaaatatatacacctactatagacacacaagattgaaaattaaaaaaattactttggtaaattttatgttctatatttttacgattaaaaataaaaataatataacctgagaatgtccctagctcagtgacaagaacacagttggttgtcaaatgtcaatttccttctcaccactcactggtgggacactcaccttggggtcatgcgaaataaatcactcacctgcaggcgttaaaaaatattagtcacatcagtcacatgaaaataattagcttctggaagtaagcagatggtggcacgcgaggaagagcaccggccactcttctctgcatcaaaacttccttaaaagcatcttccagacatggacatagcgtctaggtgtggagtgatgaccagtgtcaaagaaagcagcccggactcccccgtcttgtagatattttaccaaatcagataatgaagacatgggagggagcgcgcaaccaggaccacgggctactgagtttccactccttcccagtctcagagaagcctcctgggcatgcagagcctctgaagcctcccccagctcaactctgacttctcttctcagccgcatttctccacacaccctttcaaggctctgctcctcccactgctcctccctcactcctcccacggctcctcctcctccctcccctttcctctcagacttgcttctgagcggaaactgaaagtgaaatagggagctggctaccagcgttgagtcccctgtaaaggtgagtgaaccccactagatcaagggacccctgccctcctaggggacctctctcccctgccccagggttgcagagccccttccagtctccatccttgagccggtcccatttgccccttctcccaccagggatccctcaacccaagaccagctgcgcttccggtgctggccccctgcttgggaggaggctggggtgtggacctgactgccgagttacccagaaggggaaggggccccggctgccccctacctgggaggaggctgggttgtggacgtgactgtggagttacccagaaggggaaggggccccggctgcccccatgctggcacctgacctaggatgacggctgggtgtggctgggatagccaggactacagcctagccaggagggtagggagcccagtgtcggggaggtctgcaattctggagactcccaggtccaaaagtcctccagaggtgagaggggcaggctgtttaggatgttcaaccagaaatgtataggccttcagaattattctttgtcctagaataagtgttgtcaggaactaaactaagtttggagcagctgagaaaagagcccagggagtgctggccacggttcctgttactctgtgtgtatacatacatatacacctacatacatatatgcaactgacttccgccgttataggagggattaatgaagatatattcaaagcatgaagtatctctggcacatggaaggtacatggtaaaaagtagctataatttctcagcaacatggaggcctgttggtacccgacaggagatggatgagcactgagggtttaagcaggaatggacatgatgagagtagaactgtcaacagctttatgaggttcttgccaattttcattccctcttttagggactcagtttctccttctgtctcactggatcaatggaccaaacaatggaggagttcttgttattcagaacaggaataaacttattcaacaaactgtttgatcggtgcaaaagtaattactgtttttgacattaattgttttgccattaattttatgccttgttttgttttgttttgtttttgagagggagtctcgccgtgtcacccaggctggagtgcaatggcacaatcttggctcactgcaacctctgcctcccaggttcaagcaattctcctgcctcagcctcccaagtagctgggattacaggtgcccaccaccactcccagctaatttttgtatttttagtagagacagggttttaccatattggtcaggctggtcttgaactcctgacctaaggtgatccacccacctcggcctcccaaagtgctgggattacaggtgtgagccaccgtgcctgacccattatttttattcttattttttattttcctttgcatcattttgtttttctttttttagtatatttttaatttttgtgggcacatagtaggtatatttatgggtatatggaatattgtgatacaggtatacaatgtgtaataatcacatcagggtaagtggggcatctatcacctcaagcattgatcatctgtaatacaaactatgcaattatactcttatttttaatgtacaattaaattattgactatagtcaccctgttgtactatcaaatactagatctaattcactccacttttgtacccattaaccatcccatcttctcccccacacacagaccctccctattactcttcccagcctctggtaaccatctttctattatctaactccatgagttcaattgttttaatttttagcttctacaaatgagtgagaccatacaatgtttgtgtttctgtgcctggcttatttcacctaacataatgacctccagttccattcatgttgttgtgaatgacaggatctcattatattttatgactgaacagtactccattgtgtatacataccacattttctttatccatatatctgttgatggactcttagattgcttccaaatcttggctattgtgaaacgtgctgcagtaaacatggaagtgtggatatctctttgatatactgatttcctttctttggggtatatgctagcagtgggattgatggatcatatggtagctctatcttcagtattttgaagaacctccaaactgttctctgtagtgattgtactaatttaccttcccaccaacagcatatgagtgtacccttttctccacaccctcaccagcatttgttatagcctgtcttttggagaaaagacattttaactgagatgagattatatctcattgtagttttgatttgcatttttctgataatcaatgatgttgagcaactgttcatatgcctgtttgtcatttgtatgacttcttttgagaaatgtctgttcagatcttttgtccatttttgagtcagattattattttttttcctatagagttgtttgagctccttatatattctggttattcatcccttgtcagatggatagtttacaaatatttactccaattctgtgggctgtctcttcactttgtggattgtttcttttgctgtgcagcaccttttcaacatgatgtgatcccatttgtccaagtttgctttggctgcctgtgcttgtgggatatttgaaagaaatctttgcccagtccaatgtcctagagagttttcccaatgttttcttataatagtttcatagtttgaggccttagatttaagtctttaatccattttgatttgatttctgtatacggtgagacataggagtgtagtttcattcttctgcatgtggatatccagttttcccagcagcatttattgaagagactgtcctttcctcactgtatgttcttggtagctttgttgaaaatgtgctcactgtggatgtacagatttgtttctgggttctttattctactggtctatgtgtctgtttttatgccagtaccatgctgtttgggttactttagctctacagtataatttgacgtcagatgatgtgattcctccagttttgttctttttgctcaggatagctttggctattctgagtcttttgtgattccatataaattttaggattgttttttcctatttttgtgaagaatgtcattggtattttgatagggattatgttgactttttgtttttcttacacagactttctcatattctcttttccctttcttcttctctcccagccaaaccccctaaaggtctccacactgctgtttaacggcacacttgacaatggcttcagcagcacgcttgacaatgatgtgggaggaggtcacatgccctatctgcctggaccccttcgtggagcctgtgagcatcgagtgtggccacagcttctgccaggaatgcatctctcaggttgggaaaggtgggggcagcgtctgtcctgtgtgccggcagcgctttctgctcaagaatctccggcccaatcgacagctagccaacatggtgaacaaccttaaagaaatcagccaggaggccagagagggcacacagggggaacggtgtgcagtgcatagagagagacttcacctgttctgtgagaaagatgggaaggccctttgctgggtatgtgcccagtctcggaaacaccgtgaccacgccatggtccctcttgaggaggctgcacaggagtaccaggtgaggcctaagagacacctggtgagtgcttcgttttcagagcagggaatgggagaggaccacctctggattggaggggttagagaaaggaggggtttacctctctccatgtctaatgtaggaggagaattataagttaaacccaacctcattccccaggcgtaggagatatgcatgagaaaatgctgcaaggattaccccaccctattacttggtttgcatgggggacgaataagctgtctttctctgcaggagaagctccaggtggcattaggggaactgagaagaaagcaggagttggctgagaagttggaagtggaaattgcaataaagagagcagactggaaggtaagaatgacatcctgaaggagatcttaggctggaaggctgggcagggtccagagtcctcaactcacagccttaaccgtagctgtgcctctctgagcagtgatagagttggtccgtctcactctccagaagccagctgctctctaggtttacaaatagaggggaataaaaatgatgcaggttcaaaggggagctccccatcaggcctgaagatcaagaatcctggaagaaggtgctgagaggatctagctataccctaaagtttcgagctcctctgagtctagtctcagaggtgtgatggcgtcagcacctggatgtgtgagacaaatatcctagtagaaacccaactgctagctaagcctttcaggaaatgacaagggctgtgaggaataaacttaaggaaaccatctgaccaggtggttacttgaccatgaccagatctctggtccaaaatataatgaagaatcaatgtttgttctgcactgatgatttcctaggagaggtggggcatgtcagggatgagaggggagaagaaggagcccatccccagtagatcacagaagaggaagatttgggattgaggtagggtgtgagttgggttgtggtgacaaaacagaccctcatgtgtcatcgagtgaccttccagttactaacaggagaggaaaagcaaagaatgtccccaagccccctttcccaggacttagaggtggtggcgtgagcctggctttgtgaggttgttggaggtgggaacaggtgatttttttctcagtaactcactgagacaggaagacacaggggcacatttgagtggtgactgggcttggaagagaggttggaaaaagtccccaatgccatatattcgtgtagctgtcgttgtaggccagctacagtgtgccctcaccaagtccattcccctcactgtcccagaaacctcaaccacctacctcccaagcaaaattgtgtgtgtgtgtgtgtgcgcgcgtgtgcgtgtgcatgtgtgtgtgttttcccagacagcacagagtggagtctcttggggataggaataggtaccaatacctccattcccaaagcttgggagattttcataaaaaccacctctccctttcccttgacactaaagaaaacagtggaaacacagaaatctaggattcacgcagagtttgtgcagcaaaaaaacttcctggttgaagaagaacagaggcagctgcaggagctggagaaggatgagagggagcagctgagaatcctgggggagaaagaggccaagctggcccagcagagccaggccctacaggagctcatctcagagctagatcgaaggtgccacagctcagcactggaactgctgcaggtgagacagggaggggtttccttctacaattcagggaataactgaaaaagaccagagctatctggaactgccatttgaataaatggacacctggtccctggaatgttcttaaatgaagtagaattcaaacccatgaaaggttcgcgttcaagacgcaaagtaaagatgaaaataagtacaggacctttttaaaaatcaatttatgttgcacttagaatcatcttgcatccaccaatgatatgtttgcctcactgtaggaaactatggactagatggtctcacaagtcccttctgttctaacattctacagctcttttcccacacctgttcagtgtcactcagagtggtcatgagccattgctttcaggtttgtgcagaaaacctaattgtattgggttgacttgacaggctctcttctgcccaacattgaaccaggctttctatttatttatttatttatttatttatgagacagagtttcactcttgttgcccaggctggagtgcaatggtgtgatcttggctcactgcaacctccgcctcccgggttcaagcgattctcctgcctcagcctcacatcaccacacctggctaattttgcatccctagtagagatgggatttctccatgttggtcaggctggtctcaaactcccaaccgtaggtgatctgcccccctcagcctcccaaagtgctgggattacaagagtgagccactacacctgtctgtaaaccaggctttccaacacacttttgactgagtctaggagcctgctagctcccatgtaatggcgcctaatccctacgacaaaaatattctcagtgatttggtttcacatacaggaagaggcaacattaagtacccaagggagctttaactaaccaacctttccttcccaaacaatgctagcccacaagtggaatagagtggtttctggacacctgaactcggccattctctgcctgtgattgtttctgggcttaagccaagctgggctatgtgccctctctgccctcctttctttctcccctggggaaaaaaaaaaaaaactggtctttgagtcagagtcctgaaactgataacccttccctagccataggtcacatccatgctgggcttctggttacctcacaagcagccacacatcctttctgctttgagctggtcagaatcatctctggggcctaggaccagaggaaggagaggaacagtgccccagggaccaaagatggatcacatcacccacagggctgatgtctcagtggcgatccagcaatccagaacttactttctgtctcttttctcctcaggaggtgataattgtcctggaaaggtaaggaggagttttctttgttagaagaggggccagcagaaagcatatatgcctatgacaaaggtgattgaattagaagtacatgcactgaagttttccccatctggcttcctattctcaaaaacttcattctctataaaatattttctggtctcagaaagctaataaatggacatctcaattggtgattgcccacagtagttggatcataacatcttcacacagtaaagtcctgccaaacagggaaatcctgggaagttctgggtcttcccggaattcagactactgggacatggcctgctgggactccttttctcagtggaatctaaccagttacctcccaaaaagagccatgagtaagacccacagtgtgggcaagactccttgaggttccttgcagaagtgattcagcctgtctcagattgcttgcctataaaatgaaattgaatgcatttgccaggtgacctcaggcttagacaggagagacagactgtccacatgctgcagagcctcctataaccaggaactcctgggtagaaactaaatcctgcattgtttgcctctcacacccactcctggagacttgaacaccagaggtctttgtaaatttgagttgaattaaattatcggagtcctccacaatggaggttatagtgttagggtttgggataggagtaggagacaggagtctcaaactctctttcccccaggagtgagtcctggaacctgaaggacctggatattacctctccagaactcaggagtgtgtgccatgtgccagggctgaagaagatgctgaggacatgtgcaggtgaggcaagttctagttttgcgggggataatggggtgcagagtagatcccagggtcagggagcctggatggcaacttggaggagagatggcaggtcagagcagggggaacagagatggaggtaaggaagatggtttcttcagaggtcaggaccaaggccagaactggctgatggtcatttcctcacacagggaggttcacccctcatgcttaccctggagtttacacaaaatccccccaccacaggcacagacttagtgaactccccccatgcaaggcctgactgtggtcctctctctgcagtccacatcactctggatccagacacagccaatccgtggctgatactttcagaagatcggagacaagtgaggcttggagacacccagcagagcatacctggaaatgaagagagatttgatagttatcctatggtcctgggtgcccagcactttcactctggaaaacattactgggaggtagatgtgacaggaaaggaggcctgggacctgggtgtctgcagagactctgtgcgcaggaaggggcactttttgcttagttccaagagtggcttctggacaatttggttgtggaacaaacaaaaatatgaggctggcacctacccccagactcccctccaccttcaggtgcctccatgccaagttgggattttcctggactatgaggctggcatggtctccttctacaacatcactgaccatggctccctcatctactccttctctgaatgtgcctttacaggacctctgcggcccttcttcagtcctggtttcaatgatggaggaaaaaacacagcccctctaaccctctgtccactgaatattggatcacaaggatccactgactattgatggctttctctggacactgccactctccccattggcaccgcttctcagccacaaaccctgcctcttttccccatgaactctgaaccacctttgtctctgcagaggcatccggatcccagcaagcgagctttagcagggaagtcacttcaccatcaacattcctgccccagatggctttgtgattccctccagtgaagcagcctccttatatttggcccaaactcatcttgatcaaccaaaaacatgtttctgccttctttatgggacttaagttttttttttctcctctccatctctaggatgtcgtctttggtgagatctctattatatcttgtatggtttgcaaaagggcttcctaaaaataaaaaataaaatttaaaaaactgtgcctccgtctatcccattcagtccttgttccttaatcctgaaatacttgagaactctgaatatgattaatagtgatgtgtctttaacactgcacgtgcttttcatgcctagactgtcccatttgaaatgtttgatcttggactgaagacccaggtcaagtcaagtcttctgtacttccccatcattgccttccccatcatagccgctgtggtgatagaaggccatttgggctctgatcgctgtccgaggggatattacctccttaccatgagggaacacctgcttttgaaatacaaagttctcctggggctggagtagctctgtgacctctgcatctctgaccctcacagacctgaagcaccttctgtccatgttctcagtaagtgacgagtgacaacatcaaagttcttggagctctctggggcttccctatgctttcagtgttctagacaactggccaattcctgtgccccttggaatatccagttttaatgttatttctctctggaatgcacctttcttgggcaaagttttcggacttttccagaagagtaaatgttacatccgctaagggataaagaaaaagggggtgtgtgctgtgggtgtgaccacatccccaatcatgaggaagggatttggagcctgaagaaatgtgtgtctgtgtcagcatgtgctcacattcggcaggtgaggccatgagtattaggaagaaagggaccatcttgtcttccagaagcttccactgcagacgatgaggtatcctttcaggcaaggtgaggagagactttgtgtggaggtaagaagagaacacagcagcaaagagtaagtgaagcatggcttcatcttcttcctgtctctatgaccaggctacctcccctaaaactcctgccccgggccccacgcctcctacttgaatggtttggacgaggaaagaagaggttgaaaggatatggaaagaaagccaaacaaaggagctgtctaagttcctggacacagccactaacaagccctctctaacatgtgcagctcaggcctgtgccccagggctggggctttgggatgggaagacagacagacagaagaggagcaggagctgtagcagggtcaaagatgcgtctctgggaagggaagggcccagcatctgacagcttctgcagacagatccaggagcgtgggggtggtctcaggtgtcgaagtaaaggatgagacatagactccctctagagtgtccccataagtgggtcgtggcaactttcttctcctaccttctttcaaactcagagcatctctcattgttgccacttccccctcggctctctctgacagaaaaagccattctccctgttcccatccctttccttccagatttagacttctcagccctggatgattctgcctcattccacccaccctaacccctcttcctttgaactactccccaacacacacacagacacgtgcatgcgcacatgacacatccctggctctcaacccaccttgttcttggcctcaactttgacctagatctcagagggctaccagtagatcctgtcaaggtcccaccatgggggtaaaggtcaaagcatagaagcctgtggagctggtctccctaagtctcttgcaggaattgtccaagcctggtgagggaccgcaggtggggaggttaaggtgtggaaggagctagagggagttagtgcctgcccaggggagtgtgggtcactactctttcattatcacattagcaaatatttagtcagatgataatactcaatactggcaagatggacacatttatccttgctggttgtgatgtaaatggatgcaaacatttctggaatcattttgtcaatatgtaataaaggcctcagagatttccatattatttaatttaataatcccacctctgggaatctatcctaaggaaataacttgacattgggaaatagccctatgcataaagatattcttcaatgaataacagtgaaaattggttatagcattagtgatcaacaattagcactactgtccatctagtcaatggaagactacacagccatttcaaaataaaattattaataacatgggggagatgcccatgacatattcagtgaagacagttacaccaaattgtataatttcagaaggtgggtcataactatgttaaaacaaaatgcaaataaatttttgaaatcgcctttatcctagcaaactaatgcaggaagagaaaaccaaataccacatgttctctcttataagtgggagccaaacacagggtactcatggacataaagatggcaacaaagtggggtctactagacgagggaggaagggaggagagcaaaagttgaaaaactaactgctgggtactatgctcagtaccagggtgacaggatcattcatacccaaacctcagtatcatgcagtatacccaggtaacaaacttgcacatatatccctgaatctaaaaaattgaagaaaactcacctttgtaaagattatgacagagaaatctaatgtggctgactccgacttgcttctagcctcacaggatggctgtcttcattcattcctgggcataggtcaagctaaacatgggaggaatttagtttctagtttaacttggaagcaaggatgataatagtcctttcttaaaactaaccccctccttgctcagggtccaaaacctaaagaaaggccacaagattaggattatgggaggggcctgaattctgctaaaatgtgagtgtcatttctataattcctcactgcttaggagtctgtgctgtgctgacagccaccacacccaaccttaggtacccaagagataatgacatgggagatgtcagctccatatgcgcttgtggtagattgtggaaggccctacacgccagtcttctcccctacattgggaagttttcctgttggcccaacagtctattcttacttcctttccccaggagccccatcttgtatcttcctgtctaagttcctaactaaactaacacttcccaagcagagatgaactaaagtcttacagctcagattgcaactatattttaatccaaagtctatggaagatctcactggttacttgacccttatatcttcttcttctcatccatgtgttttcactcaacatcccccatacttgccacatgatattcatcaacattctccttgtatccctaaaggtgaaggaaagggcatccccttattctttccaaagaggacataatgatatggaactagaagcaggggtgagggagtttagagatgtttgcaactaccttaatgttgtgggatttatattttaatatttaaatagattatattaattaccatagtattcaattatttgttggagattcatctgaatttagcagatgcttagtaaaaatgtatggagtaaactttggagacaccttgcctgagatggtgtgcacaagaaagttaaaaagttcttcaagaatttttgctcaaaatgagttgagacttaaatctaagacctgaaaccatacaactcctagaagagaacatggggttaggaatatcaatctaaataggtgtggtggtcttttgatatgccaccttggtggctagctataagcccctagttattcaaactaacctagatgttgctgtgaaggtattttgtagatatgattgaagtgcataattatttgactttaagtaaaggagattatcctatgtaatctgggtgggcctaattcaatcaggccttaaaagcagaactgaagcttccctgaagattatattccacctatgaataacagctttaactcatgcctgagagttccagcctaccttccatctgcctgccctatggatatacgacttgctttcccagcccccacagttgtgcaagtgaattccttgcaataaatctcttaatatatatctactactctttctgcttctccagttgaaccctgattgatatgaaagccaggactgaggtaacagcatcacctggtgacagcatactttaagtttttaaggttggaacaataaagctctaaacttgaatcacagtagactgtgagagagccctagcattccaggaactctgattccttatctaaaatagaatctcaggttgccctcagcaccatttccactaaatatttcatgaaaaatttagttactgtacaaagaagtcagtgactttgaaaagactttattgatcaaagagttgcttctaaggatgagtaatggtctatcttttaacataggacagaaaagaatcctatgaagaaaagataaaaagaacagaaaagacccaggtcttaaatcctcagatgacaactaaatcaagataaatgacaaagtcgaccagttccttgggtaataaactggagcaggaatatggaagagaattcatgcttatgcaaatgagatgtactggggaatggtgggcttgtatttgctaggttcatggagaaatatgaagaaaaagaagggtagattataaaatcagcttttctgcttctctatgtttctgccttcgagctaaccagtataaatgatggtttgctccctttcattgatatactgatgagaggagactgtcagaatgatatcaacctaaataatctcagttctcaaaatctgaataccttgggatatcaggttacctttatacttggagatatacattatatagatgatatacttcccttggtctccaccaaaataaaccaagtagtagagatttcatagaatctcaacttttacccccaccaatagtcactaacaagtaatccaggtatacctttgcatgtcacataaaagttctcctgagaaatgaggaaagactctatcagcactaattctaattctcattaatattgccctttaaaattcaaacaaactagttgaattttctaatctcttttgattctacaacttccttttgaattaggaaaaacagatattatactacaattttaaagataaagtcagtaaagcagaaaagaaagaaaatttaaaatgtatccactgcttattttgtctcatgtatattcaaggtcctgttcatactttattttatttatttttatcataggcctatgataaatgtacaatcaagacaatcaagaaatgcaatgattatgatatcctcccatatctaatttaaaataatatatttcaaatgatatcaaatatatcatttgattacattacattacattaagatagagtaatcttaatgtaatcttaattacatgaagatagagtctatctaagtgttttaactgtaatgccctagtaagtaaagttttcttatggtttaatttggttatttctgttttgatagtcctttttctggcaccctaaggatgtgccaggaagagtctctaagagaataagtaacttacccaaggtcaaacacactgttataaaggaagccaggattcaaacctaatcctgatccaaagcttatgttcttccctaaacactatacttttcaaggtcacatgacaatctgattttcaaagtcatgatcagtcactttatccatagtcagtggaatcttaattcgtaggtctctgcaaagtaggcaaaaaaaaaaaaaaaaaaaaaaaaaaaaaaaaaaaaaagcaaagccctatagtgataaacatactatcagattagtcaaatctagcatcatttcctctgtgaggacaaaagactgagcacacactcttgaatctgcctggtgttgatcccataaatgatggggttcagcatgggaggagccaacacgcagacattagccagcagaatgtgtgtatggagaggaacatggtgcccaaaccgctgggtaattatggtaaaaataccaggcaagtagaacatggaaatgactctgaggtgggagccacatgtgcccagagccttttgccgagctccttggggaggggaggtggaagcctgtatacaggatgaagctataggacactaagataagcaaggcatctagcactacagtatagagaaggacagacaagccataccaaacattgacatgaatatcagcacaagcaaacttggcaacagccatgtgctcacagtaggtatgtggcagcagattgctatggcagaaaggcagccgctttaccagaaacacatctggcatgatcacacagaagcttctcaggaccacagccaagccaatctttgtgatttttgcacgactgagcactgtggtatagtgcagtggatcacagatggccacatagcggtcaagtgccatcgccaacagaattcctgattcctcgatgaaggtagcatggataaagaagatttgggtaacacagccaccaagggatattgctccagcatagaaccaaaatatggctagggccttgggcacagtggtagtagacaggataaggtcagccacagccagcatgcagaggaaaaggtacatgggttcgtggaggctgcattcagtgatgatgatgaagatgatgaggctgttcccaaggaaagcaacaaggtaggaaataaagaaggggagagacatccatgtgtgctggtcttctaagccaggaatgctcagcagaatgaagagtgagtggctgctaccagtggagttgtgggttgtcatgcccagggaaggtcacctgagcattggtatgtaggatttggcagttacctcttctctcttcccaagaagctgaatggggttggagtagggaaggagggaacagattatttttcactggatggagcagtgaaaagggtcctgttgaagaagtcaggggatgtggtctaaaattctttgccattctattcatgaactatgtgatctcaataaaattacttccctgttctggatgtctcttttatcaccttaaaactaaagttagggacagaatggattacattattcgtaaaagagaaatttttggctctagaattccatagatctcagtctcaggttgttgtaaatgcttacaagctgcgaataacaagcacttcaatttccactttgaacaccagaatgtgatgtgaatctcaaaaggaaagtggcaactgagttacctatcaatttaatacgccttactgagtacgtgccaggcatggtttcttgaagacctacttgggacagtcagacaatcaagcaacatggctacctatctaatatgcacactgtagaagaaaagctaagcacagggagctgtggaaagaggaagaactccctaggcattcggaaaagacttgctagagtgctgccttgaagaataaataagagttcgccaagtaaagaaacatgatgagggaagaacttgaatgaagtcatagagatctgaaaagacatagggtttggaggaaaattataatgatgcagggttagtgcaaagaggacatgagagggataataaaattgtagaaaataatacaagggactgaagtaggggccaaatcattgagagatttgagtcctactctaagggctttagattgatgttgaagtagtgagagtcactgaaggatctgtagtgagagaatggcatggtaaatttacattttaggtagctttctctccggcagtattgtgtaagatggatggggaacggaggagactggagaatgagacagggatcatttaggaggggtactgtgctgcaggctttatgtgcattattacagtcaccgcagcctgagataactgttgtcatttcccccgttttgctgataggggagcacacagagctctgagaatttaagtagcacccctacccaaggtcgctgggctagcaaatgatggagctggaatttgcctttccagaccaggttttaatcacttcatgtctgccctatgccactcgatcccattcatcgggtgatggtgatttcctgactgctggttcaaggagaaaaacaaagtcggcagttataaattcccttaaattccaccgcctttactctgccacctacaaatttatttgtactcaagttgtccttttcctcttcctcctgctggaggctaagccctccatctgtgcactgacgcccaacccttctttttttctgagtacctctccccattagttggtctctctccagtaattttaacctctccctctctctttgttcctcgttcttactgagcaaatatgttcgggtgtcctgtctccccttcacctcagtgtcacaaaaggaaggatgtgctctctcttcagtaatcctctcacctccctcttgatcttcacccactgccatggtactgatagccccaacatgccacaaaagtttctttctctaaatagtcatgatctgtcacatgactattgcccaatctaatgtcacttttcatttcttatcattcataatcttcaatttctgttactaatacttcctagctttataatagcaaccattaaatacctactgcatatcatatataattattatttctaatcttcacatcaaatctgtgaaattgaaattatcactagtttattcacaaagaaactgacagataatttgcccaaagtcaaacaacttgttagtagctagcaaagctcccatcagtatttaaaacttccattttgttatattgattacctaaaccgcctttcttgggcttccaccccactctgctccaattctcctatttatgccacaacttctaaaacatgtaagacagtgaacataggaaaaataagagctttcaaatcagacctacctgggtcaaattccagctctgccagctgaaaatacacacacacacacacacacacacactcttccattcaggtgcatatttcacacatgttcattcatacactcaccatcccacatattcactctcacaaattttaatgaagatttacatacggacatttttacagtttacacaaacagcccttcactctgacacttcacatacgcatgcttttaacatttcctgcatatatgtaccctcacaaattcacacatagtcattaactaaccaaactcactcccacacggagaatttatgacttatctaagtcatctcattttgactccctcttacccctgcctccagtcttaaaatccctagcctatgccagaagaggggactgtcacagaaacacaattcacaggacaacacccctgagcttccccagtttcactcttgaacctcctaaccttgagcgagagacataaaatatatgggctgggacttaattccagggatcatcaaacttcagcctatgggccaattcctgcccattacctgcttttgtaaataaagttttattggaacacaaccattcccatttgtttacatatcatctgtgagagctcttgtggagaccatttctgaagcctaaagtatttactctaggcctttaccaaaaatgtttcccaactccttctttagaataatcttgtcacgtaactaactataagagccccagaaaagaaggcaattttcccaaggttacagaggaaatgagttaaggaagtctagaagcaagcctcttgcctctcatttcaatagtatttccaggaggccacaaatcttctgtggtaacatgttggtccactctctctgactctgttctcgggatagagaattccaaatatgacctctatagagtggccaaatgatgaaggcaattcatcattgtttctcatcaataaactcaatatttctctcacctcctttatccctacactcagtcaaaccccactgttcgtgcccatgggtagggcccacagaagcaccaggctatgctgtcagtgccaccttatacctctcctcacccccaaagagcccatctcagtcatcaggagttgccaactggagccatgcccctgtcttgatcccagagtgtccccacaccatagactgtgtgcagtgaccagcggaccaagctggaggaggaactgcaggacaaactattctttctctcagcatcttcagggagcatagtcctatccacgtgactttcttctcccctaggagttcctctacttccagtgacatcactgtaaagctcttaactctttcactgcatggatgctgggagcccaccatgaaaagcatgcttgagaggctccatgagtccaggagagaggatttggtgagagagtggtttcagagggagaaggtcagggcagatagtgggaatgtgattagagaccttcagcaaggccccaaagctcgttccataccatcctcttcaaccctgacttccagaaggcacagaaacactttaggagctgaaatcctatagattttctcaagcattcatttactcattctccaccaattcgaccaatatgggttaagtgctaactatattgacagcaccatagtagaatgctaaacaaaatcaagcccatttaaaatgtatttatatcattttgtctatggaactaatgctttgattctataatgcatagaacatcttcactgatagccttctaagcttccccccatttattgatttttatgttgtcttatatttagcatggtcttttatttaatttcataatatagaaatttttcatggaaataaatgttctatgacccacatagctcctttattctttcccatttcaagaagttgttcttactttttgaaataaattttattgtgtatgtctaagttacacaacatgatgttatggaataaggatagatagtaaaatggttactaaagtgaagcaaattaacatatttattagcttacatagttactgaatttttgctagtttttgtggtaagagtagctaaaatctacttgtttagcagaaatctcaaatacagtacacttttagcactacatagcttcattaacacagctgcatttgtctccagtatagcacaatgccacgtacatagtactctatacatatttcttgagataaaatgggtgactaaatatttaacatgggtgacataccacaatatgtttacatccttcccttatcgttgaacatttatatagcttccattattctctattaaaaatattctgtcatgaatatacttatatatgaacttttgtaggtgttctgggttattctaattaaatatttgatattcacaaaaagaaaattgttatggcaacgttttcattttacgttgtgtatggtattattgatagaaattttttatattttaataattatttataaagcttttttgcagagaaatcaaaattttttcaacttgaaacctaccctgtgccaggcacactgatatacaagagtgaagacaggtgccgttgtggaatttatggtacagagtgaaaaaataaataaataaaaatgaaaaagcaaagctccctcattaagtatttttctccattagcactttggtgccatttatttagaacctatgggagcccttaatattttaaagatgtacacccatttggggagcatttttactgcaaatgcaaagcattttccaggctttgttctagactaatgctcattcactttcttttagaagctgctactcctttgaaactcatgttacttgccttctcctactcctaatgttgtctgtctgtcttccagattccgtcacaaataaatgtaggcaaaatataaattattacagtacagctattatggaaaacagtatagaggtttctgaaaattttaaaatagagctaccatatgatccaataatctcaccactgagtgtatattcaaaggatagaaaactgatatttcaaaaatatatcggtatgcccgtgtttattgcagcattattcatagtagccaagatatcaaatcaacataggtgaccatcagcatatgaaaggatagtgaaaatgtgggatatgtacataatggaatactatttggccttataaaggaaggaaatcctgtcattggcaacaacttggatgaacccggaggccattatgttaagtgaaataaggcaggcaccaaaagtcaaatacggcatgatctcattacacatagaatctaaaaatgttgaactcataaaagcaaagagtgtaatggtagttactagagaccgtggggtgggaaagactggagagatgttggtcaaaagacacaaattttagttagagataataagtacaagagatctagtgtacaccatggtgtacaataattatgatatattatatatttgaaaaatgggaatagagtagatttcaagtgttctcactgcaaaaaaaatttatgtaagctaatgcatatattaatagcttaattcagccattccacaatgtatatgtatatcaaagaatcatattgtataaaactacttgtcaattttaaaaattaattagaaaaagtatcagcataaactacctagtataaggacggttacaacatgctctatgaatgagctaagatgtcagatgattcttgagatctaagtacacatcaccaatcagtcaaagaaggaggagattcctggcagaaaaatcaagaataaggactcagaggtagaagagcagagaatgacaaaaggagggtaaatgatgaattatgttctgtatttgaagaacagttgtgaaacatgaaatgggaaatattgctggaaaggtcacctacagcaaaatgcctaactgccttagttaccgcccaaaggtgaaaaaaaattttttttcagatggagttttgctcttgttgcccaggctggagtgcaatggcgccatctcggctcactgtaacctctgcctcccaggttcaagtgattctcctgtctcagcctcccgagtagctgggatcacaggtgcatgccaccacgcccggctaatttttgtatttttagtagaaacgggtttcatcatattggtcaggctggtctcgaactcctgacttcaggtgatctgcccgctcggcctcccaaagtgctgggattacaggtgtaagccactgagcccggctggaaatttttaagaaaggcttttctgcaactgaacaatgggataggccccaaatagtatctcctggcatcgtcctacaccattcaaacattccaaagctctaccagatgtctctagctggagaatctccaggcgttatggtacctaagcaccttaaaatttacatccagcaactgatgtcacataattctatcattcatagtatcagtttatttattcagtaatattttcagtcaataaatatttattgtgttcctatagtatgccaagcagaattgaagtgtacaatgcaaataagtaaacaaagcaaaatccttgcctttatggttgtcagctgctgtgccttagttgccctcaatggcatctctcaccatatggtctcttatttatttgtctgtcataagctatttaaatggctggtggcctaaaagagggcagaatggaagttacaaggcctctgaaagcatatgctccagaattcatatgcataactttgaccttattctattagtcaaagcaagtcataaggctatcctagattccaggagatgagtattaaacaacatgtcatgatggaggattggcacatgtgttcagcagagggaggaattgttagtggccatttttgtggatgctcaaccacacttcaaccaaactatcaaactgacaaatattcgaaagcttgacaacataccctgctggtaaggtcaggagggaaaagacatgctcatgaattgctggtggcaatgaaaaactggcacaaccctgatggtgttatatctttaatatctaacaaatctacaaatgcatttatctttgaccaagtagtcctttcctaataattaaatatgagatgcatcagtagaattacccaactaaagaagtaggaaaaaagaacagaaaaataaatgaatagggcacaggtactggtgaaacaatatcaaaaggtctaaaaaaagtttgctttgggtcccaaagtgaaatgtgagagagaatgggacaaaaaattttaagaaataattactaaaattttccaaattagataaaaatcatatatttacagattcaaaaagctaagcaaacatcaaggaggataaaaacaaagaaagctatgccttggcacatcacagtcaaactgaaaattaagaaaaagtaaaaacaaaaaaaaaactaaacagtcaagacaaacagtgaaatacaaatgtgtccaaaataatcacgactcacatgttttctactaaccattaagcaggcacacttatatatcttaggcaacagagttaagcatcattattcatgacggtgaaagctaaaacttatgaaagccagggagatcagtataacttcaacattatacttttcatgaagaacatacctttataaatcatcaacacatattaatcatcagactttatatgcctattaaaaaattggtttaacatttgtttaaataggctgttgtaaggctagattaggtgggaaaggatttgtatcagagcatcttgagaaaagcgaaagagaaaaggagcaggaggaagggagggaggtgggaagtggttttagagactcagcccacttgggaagagggcaaggctggtggaaatagctctttccctagagagtgcggcataagtgcttccctcaagggttcttctgaaagaagataaacagcccaactcctggccctcatcaggctgaattttatcacagagctcgtttctgttcctgaagtctcagtctgaggccagtgagtgaattagacatctatgggtggtactggcttcagaaataaggttagaactaggctggtgttatatcatacaggccagaggtaaaaggactcttagagactgttgaaatatgtggtaaatatatatatataccagaggcacaagtctccacttatggcggaagtgaaagatgaggatctgagaagggagggtgagagaacgtgggctagatggaatttactgaagggaagaaaagagaagcaatccagtaactagtaggcaccctaagagttagaccagagatgagaaaacataaaatatattgatgtaggctgcaaacaactcttggcataatatgaaaggagccctgaaaatggcagggaactgagtcacctgccccaagccacacattggaaggagctttgtggaggcagccagggcatcctagcaggtgtgaaaaataactaagagccaattatcctccccagaaagaagaggatgcaccaagagtgtgaactagaatggaagaaaaaatattactgatcataagatatatcttagccaacaactaaatattttaagatattcctttatttaatatcctcagaaaccccatgaagagtgtattttattatttgttgccatttcttcattccattgaaaatgggattcaatatggctgtcttctcagaaggcactctctgaagccattccacatggaacatttagtaaatctatttactcacaagcccaccattctctgaaaccataaagctatttaggactcaggcacatagcatgatgcaggaaaaaatagtcaatgctcaaaatatgcctgtgaatgaatccactaatgagtgaagaagaatattctaggaagtaaatgatgaagttacatgttcatttctaccagcagaagaatttctcaaatatcaagaactgcaacccctcttcatcccccagaaataactctttacctaatttcagtcacttctaagcctagttccctggggtgtgagcacaaagagtgcctcatctcagataaagaggtaccttgaccctcttcataagtgagcaaactgtatgtggtgaagtcagaggtttcaaatctcatttctatcaattgctgctttgtgacaagtggcaagttattcacattgtctaagactcactttccttaagtgtgaaataggggtactatccagttctaagagtggatgtctactccctgcattaagaacgtacaaagtgcaaactacagcccgtggcataaagtgatgcttaataaacattagctaaattctcctgcgactgtaatacaataagattttgtccactcctggaacaccactggccttttaggctttagtgtcttcaatcaatcaacgttccaacaaatatcaacagatcatctttctaaactaatgactgcccctgtgtaaaggatggggcctaagagtgaagttgtgatcgaagcccttcacattcaggaaaaacctgcctataccatcacctcccttgttctcctcagtactccttatgcaccagccaccctggcctgaaaatatttcagaaacatactgtgcattgatctgtacactcaccttttcttatgctactttctttctctcttcattattaactttacgataaactactcaattttaagtatcaccttattcagctttcccacacagaaataataatttcctctgtatattcataatcctccattcataattaaagcgcatacaataatgtctcttattctgattacttggagatattgtctggctgtcattcattagagtatagaccaccacctttcatatttgcatgtttgttatttacatgttcaaagaagacgaagattatggaatatgccataagctcctggtgacatcgcaaagaatgttgcagattttatcttcttctacctctgtgagtaggaggtgaggttctgaaagttctccccagctatgcctactgtaaaccacagtggcactagccacacagtcttccacttgctgggcatccctggcctacaggaccagcacatgtggatttctatcccattcttcatttcctatgtcaccgcccttcttgggaacagcctgctcatcttcattatcctcacaaagcgcagcctccatgaacccatgtacctcttcctctgcatgctggctggagcagacattgtcctctccacgtgcaccattcctcaggccttagctatcttctggttccgtgctggggacatctccctggatcgttgcatcactcagctcttcttcatccattccaccttcatctctgagtcagggatcttgctggtgatggcctttgaccactatattgccatatgctacccactgaggtacaccaccattcttacaaatgctctgatcaagaaaatttgtgtgactgtctctctgagaagttatggtacaattttccctatcatatttcttttaaaaagattgactttctgccagaataatattattccacacaccttttgtgaacacattggcctagccaaatatgcatgtaatgacattcgaataaacatttggtatgggttttccattctaatgtcgacggtggtcttagatgttgtactaatttttatttcctatatgctgattctccatgctgtcttccacatgccttctccagatgcttgccacaaagctctcaacacatttggctcccatgtctgcatcatcatcctcttttatgggtctggcatcttcacaatccttacccagaggtttggacgccacattccaccttgtatccacatcccgttggctaatgtctgcattctggctccacctatgctgaatcccattatttatgggatcaaaaccaagcaaatccaggaacaggtggttcagtttttgtttataaaacagaaataactttggtttaagaactgagttttcagaatctctagctatctggtaagtgggtatgaaagtggtagatgggagaggtcagctgataccgtaggaaataactcagtgagtacgatgtctggagcaaggtcaactgggaagttacagggcttattcttccattttttaaacaacctaggaaagcaatgcaatgtttgactgaacaaactacctcctgcacagagcctgagagagaatagattgatttttcagaagtcatgtatccttaacaggacaacactatcataatcttcggaaataaagtgggaacagtgctctggcattggaatttgttcagccatcctgtactgagtttctgaagctctgagacacgttgtattcatgtaaagtcacgtacaaacctccattcttttatgtccttcattctagctaagtgacattcttagaatcagtgattcctaggttttccatttatttctattatgttataatttatatcctatgaacatgaatgtctataatagaggattgcaaataaattatgtgattcatattttgcagaacaacccttgaggaacctgagtctgatcatttttgtgttgggaaatgacatatggtttctgaaggtgtggtgtgtgctggggaaattctgaagaaagggaactccttcattctcagtgtcaggctgtgttcttcaatgatctcctcctcaggaggacattcaagatgtctattcacgtgaattctgcgtgcttttacaaccacacttcccaataccttctatgcaacctgagctttagatacaccaggccattaatttgtccgttttctcaggttataccatactcttcgggtactctgccttctcttgagataacctccatcaacttgtggaaaactcttattcctcctttcatatctaattctcatgtcatctcctctgtgacattttctccaatcacaattccttctcagtgtattatagttgatacttttttatgagaaaaaaggcatattgctcatattttcaacacttattttattaaaagcctatgttacttctgggaagcattagaaattatgaaaaaacaaacttgaaatggagctcataaaactataatcttagagctctcaagcaattttactgttaaaatttgttatacatagctatacatctttgtttataaatttacatatctatacatctgtatctatatctgaatctgtatttgtatttattttcatctgtatcaattcctatatctatttgctaaatattataatatgataagtatgtagaatagtgactatactatagttgtagtctataacctaatttttcccttttataaattttaaaaatttttttattgaaaaataaaattatatttatcagtacatgttttaaaatatgtatacattgtggaatgggtaaattgagctaattaacatatacgttacctcatttgttgtggtaagaaaatttaaaacctgcattcttagcaattttcaagaatgagatgcatctattttaactataatcaccatgttgtacaatagatctcttgaacttagttctcttatctaactgaacttttgtgtcctgtgaccaacatctctccatcctctactccttaccccaccccagggtccaagccacaattctactctacttctatgtgttcaacatgtgagtaagataatggggtatttgtctttctgtgcctggcttacttcatttaacattatgtcctctaagttcatccatgttattgcaaatgacagaatttctttcttttataagactgaatagtattctattatgtgtatatactacattttctatatccattcatccatcgatagacacttattttgagtccatatctgggatattgtggatagtgctgcaatgaacatgagaatgaatatgtcttcaacatactgatttcatatatttggatatatacacagtagtgagattgctggatcatagctagttctatttttaatttttttatgactgtccatactgttttccataatagttatactatctaacattcccaccaacaatgtgcaagggttccccttctccccattctctccaacactttttatcttttgtcttttcgttaatagtcattctaacatgtatgaggtgatatctcattgtggttttaatttgcatttccctgatgattaattttgttgacctttttcttttcttcatttacctatgggccatttgtatgtcttatttgagaattgcctatttaggtactttgcccattttttaagaagtttattccctactattgggttgttggaattatttatctattttggctattaaccccttatcagataaaggtttgcaaatattttctcccattccatagattgcctttttcttctgttttttcctgcctatgcagaagtttttgtag

SEQ ID NO: 776 - DNA, 777 bp, Homo sapiens
cccaccggcccgatgagctgcagcggctccggcgcggaccccgaggcggcgccggcctccgccgcctcggccccgggccccgcgcccccggtctcggctcccgccgcgctgccctccagcaccgccgcggagaacaaggccagccccgcggggacagcggggggacctggggctggagcagctgctgggggcacgggacccttggcggcgcgggccggggagccagctgagcggcgtggggcggctccggtgtcggcgggtggcgcggcgcccccggagggggccatatctaacggggtttacgtactgccgagcgcggccaacggagacgtgaagcccgtggtgtccagcacgcctttggtggacttcttgatgcagctggaagattacacgcctacgatcccagatgcagtgactggttactacctgaaccgtgctggctttgaggcctcagacccacgcataattcggctcatctccttagctgcccagaaattcatctcagatattgccaatgatgccctacagcactgcaaaatgaagggcacggcctccggcagctcccggagcaagagcaaggaccgcaagtacactctaaccatggaggacttgacccctgccctcagcgagtatggcatcaatgtgaagaagccgcactacttcacctgagccacccaacctaaatgtacttatctgtccccatgtccccacaccagcctgttttcataataaactttattgtgaaaaaaaaaaaaaaaaaaaaaaaaaaaaaaaaaa

SEQ ID NO: 777 - DNA, 15259 bp, Homo sapiens
tggaatccactgatgtaagtgagctagcatcatccttttgaagcattttgttcatctgtagcttccttaaaatagggctttttaaaaagatctggccagtgcagtagctcatgcctgtaatcccagcactttgggagactgaggtgggaggatcacttgggcacaggagtctgaaaccagcctgggcaatgtggcaaaataccgtctctacaaaagatttctaagatagccagacctggtgacaggtgcctgtagtcccagctacttgggagggtaagctgggaggatcgcttaagcccaggaggtggaggctgcagtgagccgtgttcacaccactgcactccagcctgggcaacagagtgagaccctgtctcaaaaaaaaaaccaaaaaatctgtctttcgcagctacaggtcattaatctgaccagctgctccagaaagattgaagtaacatgagggagcaaatatctgcttcaacttccacccccttccctgagagcatgcatttattcagaaacatccactcagtccctgctctggggacagactagtgaaaacaatgcctctggacagatggtaaagaaataatcacaaatcgtgatattactataaggaaaagtacatggtgctgtgtgaagtgctgcaggaggacacagttcatggggggcggacttggaggggagggccaacagaggccttctgaaaaaaatgacacttaaacagacctaaagactgtccaaaagtatgtcaagtgaaaggggaagcaaggcattgcaggcagaaggaaacacgtatgtgaagatcctgaggcaacaggaaatttgatgcattccgagaacagagactgagcaagagaagggaacagaatgaggctagacagggagacaacagctggatcaccgaaggctctgaaagacgcagtcatgagcttggattttatcagaagggtaatgggacagccagcgggttctcagcagaccaacaaaatcagacttagaaagatcactcttgctcagcctgagagaaccgattggagggaacaagagagggcaaagccccaagtaccttcttgttcatcactctaaccctagcacctagcatggtgcccacacataactggcactcagtaaatgtttgtggaatgaatgaccgtggaaacaggagactattgcagtaaccaaggctggcagccgaacacaagtgttccgagttgagatgttttgtaagtcgaggtgatggggcttagcaatggactgactgaatgtgggggtttggggataagagaaaaacaagtcaggcatgactcccatgaatctggcttggcccacctatctgattggaagggctggcttaaagagataggtaagatggaagaagaggtgcagggaaagagttcacagattatctaccaactcccatcacacgcgtgtctgagcatctgagcaacacctggcccaagagctgggactaagctccctgagcatgaggcggtggcatactttctgcgccccggctctcccagatgcatgcgaggcactgcgagccgactctttactatgtaaactccccgaacttatccgagccgcagtttcctcgtaagatcgtggcaagcatcaacgcatcaaactccaggcctaagctgggtgtgaaagcgcccccctgagagtggggcggaattcccacgtctctccccgcccggtactgcctttcctcaggacgcgggcctgtcaggctcctctcgcccctggtccgcccgcgtcccccgacccgaggtcagcctacctgccggccccgcggcggcagcgcgctgcagcccaggctgatgtagacaggcagcttctcctgggtcagcgacagccggtacccagccagcctgccacggccgctgccacggatacagagcctgtttacctatgacgtcactaccttcctgactccggaagcacttacagcccccattccacagagcctgctgggaaacagaggcccgaggggaggcccggcctacaagacccagaagccttagcgccggcaaggcggccagaagtagctctgctctctccgcgaagaccctcgggggattccgcctccaccctttcccggatagagcgctatgcatgcagggacttgtagtctcaggctccccagccggctgggctgggcagcactccgggcggagtcgacgagcgcaggatgtgagctcacagcttgggactgctgaggggcaggcggctgcaggctaggggcggctcggagtccgctggccacccagctgagaggagaggcgcccccggggacggtgagagccgggcccgccgatgccctcggggaagggatggacggcccctgctggagtagagcgagcccggccgggtcctgggggaaaaggcgcgggcggcgtaggggagatggagagctccgatctcccacggagggtgggcgtgagaaccggtgtgggtttctcggtagtgaggagtggtccgggctagagaagagcccacaccggccacatttcccaggactttttgggtgacgcttaacctttacacctagggtttctgctagatccgccactctagccctcagctttcctcccgccgtcctccgtgtctgacggatttctgggtccttcttccttttagacccctcctctttccacctccgcggctgtttgccctttgttgtgcttgggttcccattagcttcgttgcgtgagccacggatccgcccttagccccgggcatccccaaatatccacacacaaagtgcggaaggaagagcactgtggctatcagtggaaacttcattctcactggaattactttctggggcgtcacctgccacagaattcctggaacccattggtctgggcggaatgtgattgacgtcatccaggggctcaaagcaattgctttgtaggaaaggaagagattagctctggatccgccgacctctcttggcaggcctatcctttgagctcctttgcattggcagaacatgtatgtgtgctttctctgatcctgggaaaactaggactagacacaaaatacacagggaacttgctaatacctgttagagaggtggatttattcctttgaggtgggcgggaaaagggaaggtgatctcataccattctagtgtttcttagtcattggcaacctcctggtgagggctcacctcccatacccaacccctgtggcaaatgaaagagtctcccagacaagccgccaaaggaattcactgcttcacacagcacccacgctggctgtccacttccttggacattcttcccagggacttacctaaatcttttcagggacaatttcagtctaacaaactgacgtatgttaaatacttaaaatgtgcatggcattgtgctgagcaccattaggggaacacagcggtaaacttgggaaaccagtgccctgcttctgggttgcacttacaaggcatgagcaactgtaaactcctgcatgtgatgagcattcggtgaaatcattccactttttttctgtctccattattaccaatgtggtccaggctgccatcatctcttcttgcctagactactgcttcctctggtcttcccactttctctcttgcacctttacaattcattctctacccagcagcaagttatcttttcaaaatacactacaagcaagtcagatcatatcactcccctgcttgcaaccctccaattgattcatatactatatagcaattagtatgaaatccacctttgttatcatctaacgcctgccttccctgacttgacatcaaaccaacttccccctactgtctgtgcaccagccattatgaccgtatttctgatcctcaaacttgttttaattttgtcattgttgagatgagatttccctatgtcacccaggctgactttcccaggctcaagcagtcatcccacctcagcctcccgagcagctgggaccacaggcatgagccaccatatctggctaatttttttttatttgtagaaacaaactctcactatgttgcccagactggtcttgaactcctgggctcaagcaatccacccacttcggcctcctaaagtgctaggattacaggtgtgagccaccacacccgccccctaaaacttgtttctaacaggaactttgcacttactcttccatctgtctacaatgctctcttcaaacctcagctgaaatgtcaccatcccaaagatgcttttcctgtccctctgtctaaattagtgcctctccctaatcactctcatatcactgttttattatctttattgcatttatcaggttctggaattatctgcttatttatttaagtccttgttgctagtctgtttccttccactagaatgtaagctccatgtggacatgactttctatatgtgttctcttctgagtacccaatgcctggcacgtaggggtacaataaatgctagctttctctctttttaaaaattcctgttatgatgcttctttgaactgtttgaaggcaaagacaatattttttcattgttccctactgcttaacatagtaggcactcagtagtttaattgctgaatgagttaaatgagctagtacatattaaatgccaagagatggggtcttgctatgttgccaaggctggtcttgactcctgggctcaagagatcctcccacctcggcctactgagtagccaggagtacaggcaggtggcagcacacatctcacctcattgtttttagatttatcctctgatcttttctagtcctttcttctcccattcttattgggagggaagaggagagtagggctgggctccctctcaggaaaaagaaaggaaaacagccatcctatagctgttcttccctgaaaaatggtgacaatttcaggaacttgggacaaggctggtgccaagaaaggggaaggtcaggaagccccagccgaagcccaggtaacctgcaccaagaacactggccggcacccccgaccctggcttactgcattctctcctgaagctgcttttactttccttcctgaagccagactctcggtggtgctcaaaataaacactggcacaggctgctctggaggctggaatctttagaaaggaagtgcatcctgtccctctggctcctgggaaactcctagactggctggattcccagtaggtttggttggaagtctgggatcctgggaaccttgacaagaaagtaactggaatctgactggtagatctctagggtgatctgttcctctggccctctctaactggttccatgggtttgcttgtcttcctcgctgccctgagtggagctgagtctcagggaggctgatgaggtgaccagggcaggagtctgggagactgcctccagccctggttcctgctatagtaaaaatggcagggaggccagacgcggtgattcatacttataatcccagcactttgggagactgaggtgggcggatcgcctgcgctcaggaattcgagaccagcctgggcagcatggtaaaaccctgtctctaccaaaaaaaaaaaaaaaaaaaattagctgggtgtggtggtgtgcacctgtggtcccagctactcaggaggctgaggtgggaggatcacttgagcctgggaggcaaaggctgcagtgagccgagatggcaccactgcactccagcctgggtgacagagtgagaccctgtctctaagaaaaaaaaaaaaaaaaaagaaagcaaaatggcagggacttagcctctgccagggagcagtgcttgggcttgtcagggagagaatgagtacggtcgtgtttctgctattgtctcctcctgggctgtctcagctggttcgtgtcttctcttccctctcccatgtacagcactgagattatgaggctctggcctccactggccactcactcgtgaccctttccaccacggcggagccttccaagcctacctcctgccgtgtggtgatctacctgcagcgggagatgtcgggggacacctgcctgtgcccagcctcaggggccaagcccaagctcagtggcttcaagggaggagggttgggcaacaagtatgtccagctcaacgtgggcggctctctgtactacaccactgtgcgggccctgacccgccacgacaccatgctcaaggccatgttcagtgggcgcatggaggtgctgaccgacaaagaaggtgaggcactggggctgccgctcggggtggggagggcaggaggagttcccaaggaaatgaccagatctagaattcagtcacttttcctcttcactttatgtagggtgtcttcacctggagtccctagtagagcttcagaattctgtgaaattgtatatggaatgctgtgtttatgcattttccaggaagaagagccatacttttaaaatatttaaataggacaagattctcataggagccgtcaccttaagactgggcagcgggcagaaggccggcagtggctggtggtttctgtgttgggctgggcctggtaccctgagcctaggcccctgtggcttctacagcctggagggctgtatcccccgtgggatgtgccagttctgggtttcagagaggaagggtgaagagcagccatgggcctgagtgctagaacctccatccccgcctctgtcaccctgcgtaagggctttgtgctcgtggacccccttccctgccacctgccgccagcttgtcaggtggcctttgcctgcctcggaggtacctggcggcaaactaaccctgtagggccttctgcacccctaggctggatcctcatagaccgttgtggaaagcactttggcaccattttgaattacctccgagatgacaccatcaccctccctcagaaccggcaagaaatcaaggaattgatggctgaagcaaagtattacctcatccaggggctggtgaatatgtgccagagtgccctgcaggtacatgggtggggcggagcagggcgggcagatgaggtcaggagttgcccccttcttgtgggatggaggactctggttcctggcaggttgtgtgggaggcgtggttgatgagtgcaaacctaatgagacaagtgagatgccacccaggcccaccaacctggcagccaggtgttcacacttggcagcgtgagtaggccctgcttctggtttctatgctttgctacccggattttagggggtttttctgtttttgcttttgtttctgtttttgtttttgttttttgagacagggtttcactcctgtcacccaggctggagtgcagtggtgcgatgtcagctcactgcaacttctgcctcctgggttcaagtgattctcgtgatttggccttcagagtagctgggaatgcagcatgcgccatggcacccagctaatctttgtattttttgtagagatgaggtttcaccatgttttccaggctagtctcgaactgctgggctcaagtgatctgcctgcctcagcctcccaaagtgctgggattgcaggtgtgagctaccgcacccggcctggatcttgggttttctaactgggggtctgctttccagctggcagtttctattgtcaggggcctcatgatctgtatctgacacttcctcaccaagcagcgggtggccatggcagaggggctccagaggtatacctcgataagcctgggaagcagaagatcctaaagagggttctctgttctgtgtcgcacaggacaagaaggactcctaccagcctgtgtgcaacatccccatcatcacatccctaaaggaggaggagcggctcatcgaatcctccaccaaggtaccaggacctctgaggggtgcgggccggggatgccagtcccctggcctggcccctcactctgaactccttcacagcccgtggtgaagctgctgtacaacagaagcaacaacaagtattcctacaccaggtagggtgcgtcacagggctcaacagacactgggcagcagacccaaggagtactgcctgtactcccagcacggtcggcgtgggtctgggcctgggtcttggaactggctgtgccaagttggggaaaaacagaaagtagaagggaaattgggacagaggcctttggaactcagcagggtgccctggctgggatataaatgattgaaggtgaaatgcgccctcaacgtgtatcacgaaggcagcatggcaggtgttttcacacgtgtcatcctaccgggtggaggggatgctaggaggccggtgagctgggagtcccccaagccagcctgtgcagttcacactgggccgattccctccccacaccctccaggccatgtcctctccataggccacagttaggtagacgcaggtggctgcaggttcagagtcccaaaccctccctatgattccctgtggccaggcatattgccactgtcacccccacagtaagggaaggaatgcctcccactgacatagcagccttgtctccttccttccagggttagtgaggggagacctccttcctcagctgtccctactttgacttaaaaccaactgagttccttttcctcacaggccccccaacccagagggtaccctatgatcctttctctcctggccccctggcatcttgctttcatttcggcaggacaggatgggggaagggagggaggggagggccccacttgtctagcaccctcccttggactggaacctcactcccaggccgcttggccctcatgtttttttcagcaactctgacgaccacctgctgaaaaacatcgagctgtttgacaagctctccctgcgcttcaacggccgcgtgctcttcatcaaggatgtcattggtgacgagatctgctgctggtccttttatggccagggccgtaagctggcagaggtgtgctgtacctccatcgtgtatgccacggagaagaagcagaccaaggtgtgggggattgcccctgcctgggtaggggaggacacacacccactgtgcgggggacgtggtcgggctgtgaccagcacggagcaaaaggggcatggacttggctcttttttccaaacacggtaatggtgctgggcaaggacaaggccagaacaaggggtgtggggaatggacgggaactgctttgttcctgacagcgcagggcaggggccgttgaccaccaggaagtagcctagtacagtgggaaggactgggtctttgaagttggcccaattcaggtttgaacgctggctcacaccacttgccagttttctgactttggataagccacttaagccatctgggcctcaggttcctcatttgcagacatggggatgatagtatgaatttaacgagatatgaaaatgatacaactctttggagcagcagtgtggtgtagaaacagcttgggctttcgtgttagaatgctgttcagatctcctgtctgagccagggacacaggtgggcacagcacttgagcccaggagttcaagaccaccctggacaacatggtgaaaccccgtctttacaaaaaatagaaaaattagccaggcatcgtggcacatgcctgtagtcccaagtactcaggaggctgctgtgggaagatcccttgagcccaggagtttgaggccagcctaagcaaaatagcaagattccacttccaaacacttttaataataataaaataaaatctccttactggccccaaccagctgggggtttctggctaatcaacttagtgccaggtacacaggaggcatttgataggtgacagtcatcacaaactcaggtggcccctctcccccaggctgcagtcagttaccccagagagtagctgcctcctgtgagtgcaggtcctggagatgatacgctggggtggatggcaggtcatccaggaagggccatgtgggtgtgaagagctcaaagtagccagacttgccaagcaacttgtcgacccccaaactactccaggtgcctccagctgggagatctgcagagggtttggggaaggccaacttacaggtggccctgcttccttctgcggtttttggtgtaggggtgggagggagggcgacaggtggttcctgaccctatcggtggtgaaagggttcaggggcaggtctccagtggctggtgatgctgcgacggaagtggcagcgcacctggcatcttcttaagtgtgttgtctttcatgaactcgtgtgacccctcacaacatgcctgtgagacacgcagggctagagccactctccccatgtgacagatgagtgaacagaagctcagtccaacagagcaggtctggctagaattcaggtgcttgactgccttccctttctccttcctccaggcaggtcatgccggtgacacactgcgtcaggcaggcagagaaaggcagcataaccactcagcatagcagctgctctgtgtatgcctctgcttggtggtttgctgtgtgccaatcttctgctaagcaatcacatctttcccgtaatgttgacagcaactctcaggggttgagctgaaccaaccttttgtacatatgggagctgcagcccagaagggttcagcccaaggctccacagctagcaagtggtagagctgtgttgggacctagctctggcccaccctctatgcccactagtcccttggtctcaggctggggcaggggtgtggaggatgttggtcttccctgtcctcatgtctgtagagtacatcccctcaccccgccttcggagggaggctggctttccctggagacggaccgccacctgttttatgagaggtagcggaggccttatggagcctcagggccagccgctctgacgcatggcttcctcttgaagatgaaaccttgctccaccttcttcctccctaaccccaggtggaattcccagaggcccgaatctatgaggagacactcaacgtcctactctatgagactccccgcgtccccgacaactccttgttggaggccacaagccgtagccgcagccaggcttcccccagtgaagatgaggagacctttgaactgcgggaccgtgtccgccgcatccacgtcaagcgctacagcacttacgatgaccggcagctcggccaccagtctacccatcgcgactgaccagaccctcagggagtcagggcacgggaggccctatctcccatcctgtggaacccgccccattggccaccccatgctgctgctgcctgggtctctgctctagcacccagaggcatgacaggccctgctcagaggtcagagggtctgggcagaggagggaccacattcccctgccttgcccctgagcacttctggagactgcgtcctgtcctatctgctcaccatcacccttcctgcccgacggagctgcttctgctccctggggcatatggactgacccacctcctgctgagaaccttcccctaggccctgtgcagaaggctactgccccttaggcctcagctgggggaaaggcagttctggtgctgtagaggccctggtgcagaaagtgggacgtcttttttcctaaggtgtttaagcacaggcttgataagtttggtttttaaaaaataatctaggaaatgaataattctaaatctagtaatgaggaaactgagcatttcttttgccctccagggtgccaagaccctacatatgacagaacccttggcccttctccatgcctgtgggatctgtttctttaaagcactttgtactgttattcaggaggttgataatctccttgacccatgtctttctaccctaatccccacttccctgcagaatcaatctgagggaggggataaagaggaagcaataaaaaaaaaacatccgacagagcagctctggctttgcagcctggccagcagctcagagtgcaccgaggagggaaggatggctaagctgggaccggcagtcctcacagggtgcctgtgagaaaggacattttacccccacatcatagtcacatcactgactcctaggtctagcacgactgctctttgtgattctcttgagtacccttggcttccagccatgctgtcctcacatacggtaaagccaaagagctgtcacatgggccagaaacatgagccacggcaggaagaccgtggagcccgtgggcactgcatggtgttggctggcatgcccatcagctgaggacagcaaactcccagcagcccctacagaggtggcacatgcttggccacacatctactccctgcccacaccatctatgctcttggttggtgctggctgggatggcggttctgcccagtggtgtctctgagcgcgggatgacaggagcaaccgaagcaccctgaaggccttcactccttgttgggtaactcagccatggagatgccaagcactagccaggaggtgagttcctctttagggctttggttttcattcctttttgtttggcttggccaaaccagaattcagcttatctgaattattttccaaaggaatgctgtcagggagggactgttctgccagcctaacaaagcaacgtagccacgtatagtacccactttctgctctttggagagaacacaggttatcaagttcatctctcttgactactcttatgatagctgatgccacagagcctatgggcaaatgccagacccagggttagacacaaggacctgaagtgacatgacggcgggacaggggaaatgtgactttctaattaggcattttatgttagtcacagtcttgaatgtataaacagcactaagactctcaggtcaggtaccttggtgatcagctactagttcttccagccctcattgaggtaacaagataaagacaaatccacttctttggccaaattcaggctttggctttatgactttcccacagagactggaatgcgtcagcctgagaccactggcctattttctcagctgccctcttgaggtcctttaacactcaaattcccagctccccactgaggtgttgtgatgcttgccttttgacctccccatcccctttagtccctgcttactactttgacattcacatcctcagtgtctcagtcttttttgccgagaaagcacagtagtctgggactgggcatttatcttctctgactgaaaatctctccttggtcttaaggaaaatactaacattgaactcactgacatgatcttagcttctttaatcagactttgtgacttaaaagtttgggggttttctttgaaagtttccagccctattcagaaagcaactcttggctgtgtgcatttttcaactccaagcagcccaggggtaagtaaacaaagtatggatgaaggtcagattttcttgtcagtttctgagaaacctggcagcctgctgttaacaacacaggccagtattgggttttattgaatttggtatgtgaccaaggtcggcctaaaggatggcgcaggtcctgggcaggaaagaatttttcctttatcacataactgtaatatttggttgctcagcataagtgatggaagcaaacactaatttctaataaaattgtgttaaactcaatggtacagagccatgtttacagtgagcaggccttgaccagcttgcggccatgggctgagttcctgtgcttctgtttatcatctgaccttgtgttctagccaggtcgtaagcgcgactgtactgttgccctgcaaccccagctccccctggaggactaaggacaagaataacaagggctggaactgtgatttaatattaattcaagaaaactacctctaacaatcactgcagtggcggaggaaaagaaatcctaagaattggggcaagatgcagcacaattcatctctggctcttggaaatctgagagaagctcaggaagtagcttgacttagtcatcaatccatacctaaagctgctcctcagccaaaattcctgcatttgtggtctggatgcttggcagagtcatgctgagggctggcacacccattgctccaggaaacccgactggcttgcctccctcctctcctgggcctagcgaggccagaaatggcaatggtcggtcagtgctaagagccaggccactccgaccctgacactggcctccctctctgcatttggcagaaggtaaagtgaacaagagtccagtccagcacccccgccaactagctgagaggcacagtgaccctaggagatgtccagccagcctccaggctgagagggaaacaggcacatgccctaccaggggggcagctccctggaagggcagcaaagaaagcagtcaagggcgcacactgggtcagaaggggagcctgagactctgggagcagaaatggcaagggtggccaagcgtgcactggtttactgatcaaacctcacgtgacaggccaggaaactcctccaggcctgtggcagctgaacacagttccttggtggagaggtttactggaacatggtgtaggcagggcttatgaggaggccagccttggaggtgtcccacatgggtcttctgaagaaaagttataccacccctccccacaaaaagaaccccacaatcaaattaagagacccactgtggcccatgatggggagagaagagttctgcagcaattgtgggatgagagttgttcttcccggtgaccaagcctgggcacttggggcctcagctggcctaccagtgaaggcctgagggtggtgtcttctcatctttattgctttccagggagaagggaggaatccgaacatcaaagtgggagccatcaggtctttcaaagcggaacgtgcccctacagtcagaaagaagctggtttagaaggagccagggctgaggcctcctaaggatctggatggccccatgccctcagctgccagccacagaggacatgtgagcctgagctctcttctatctctagctcatgacaggatgactggtccagagacccaagagcccctcatggttatccatgaaaagaaaaacacagctgcagtggctcacgcctgaaatcccagcattttgggaggctgatgccagcagatcacctgaggtcacctgaggtggggagtttgagaccagcctgaccaacatggagaaaccccgtctccactaaaaatacaaaattagccgggcgtggtggcgcatgcctgtaatcccagctactcgggaggctgaggcaagagaatggcttgaacctgggaggcggaggttgcagtgagccaagattgtgccattgcactccagcctgggcaataagtgaaactccatctcacaaaagaaaaaaggaaaacacagctgtccagattctggcctttagatacatactgcataagctagccaactgcattttcaggtaaaggagtgaaacaccaagg

SEQ ID NO: 778 - DNA, 2824 bp, Homo sapiens
gaaaagcggcccgacctgcttgcggtgtagtgggcggaccgcgcggctggaggtgtgaggatccgaacccaggggtggggggtggaggcggctcctgcgatcgaaggggacttgagactcaccggccgcacgccatgagggccctgtgggtgctgggcctctgctgcgtcctgctgaccttcgggtcggtcagagctgacgatgaagttgatgtggatggtacagtagaagaggatctgggtaaaagtagagaaggatcaaggacggatgatgaagtagtacagagagaggaagaagctattcagttggatggattaaatgcatcacaaataagagaacttagagagaagtcggaaaagtttgccttccaagccgaagttaacagaatgatgaaacttatcatcaattcattgtataaaaataaagagattttcctgagagaactgatttcaaatgcttctgatgctttagataagataaggctaatatcactgactgatgaaaatgctctttctggaaatgaggaactaacagtcaaaattaagtgtgataaggagaagaacctgctgcatgtcacagacaccggtgtaggaatgaccagagaagagttggttaaaaaccttggtaccatagccaaatctgggacaagcgagtttttaaacaaaatgactgaagcacaggaagatggccagtcaacttctgaattgattggccagtttggtgtcggtttctattccgccttccttgtagcagataaggttattgtcacttcaaaacacaacaacgatactcagcacatctgggagtctgactccaatgaattttctgtaattgctgacccaagaggaaacactctaggacggggaacgacaattacccttgtcttaaaagaagaagcatctgattaccttgaattggatacaattaaaaatctcgtcaaaaaatattcacagttcataaactttcctatttatgtatggagcagcaagactgaaactgttgaggagcccatggaggaagaagaagcagccaaagaagagaaagaagaatctgatgatgaagctgcagtagaggaagaagaagaagaaaagaaaccaaagactaaaaaagttgaaaaaactgtctgggactgggaacttatgaatgatatcaaaccaatatggcagagaccatcaaaagaagtagaagaagatgaatacaaagctttctacaaatcattttcaaaggaaagtgatgaccccatggcttatattcactttactgctgaaggggaagttaccttcaaatcaattttatttgtacccacatctgctccacgtggtctgtttgacgaatatggatctaaaaagagcgattacattaagctctatgtgcgccgtgtattcatcacagacgacttccatgatatgatgcctaaatacctcaattttgtcaagggtgtggtggactcagatgatctccccttgaatgtttcccgcgagactcttcagcaacataaactgcttaaggtgattaggaagaagcttgttcgtaaaacgctggacatgatcaagaagattgctgatgataaatacaatgatactttttggaaagaatttggtaccaacatcaagcttggtgtgattgaagaccactcgaatcgaacacgtcttgctaaacttcttaggttccagtcttctcatcatccaactgacattactagcctagaccagtatgtggaaagaatgaaggaaaaacaagacaaaatctacttcatggctgggtccagcagaaaagaggctgaatcttctccatttgttgagcgacttctgaaaaagggctatgaagttatttacctcacagaacctgtggatgaatactgtattcaggcccttcccgaatttgatgggaagaggttccagaatgttgccaaggaaggagtgaagttcgatgaaagtgagaaaactaaggagagtcgtgaagcagttgagaaagaatttgagcctctgctgaattggatgaaagataaagcccttaaggacaagattgaaaaggctgtggtgtctcagcgcctgacagaatctccgtgtgctttggtggccagccagtacggatggtctggcaacatggagagaatcatgaaagcacaagcgtaccaaacgggcaaggacatctctacaaattactatgcgagtcagaagaaaacatttgaaattaatcccagacacccgctgatcagagacatgcttcgacgaattaaggaagatgaagatgataaaacagttttggatcttgctgtggttttgtttgaaacagcaacgcttcggtcagggtatcttttaccagacactaaagcatatggagatagaatagaaagaatgcttcgcctcagtttgaacattgaccctgatgcaaaggtggaagaagagcccgaagaagaacctgaagagacagcagaagacacaacagaagacacagagcaagacgaagatgaagaaatggatgtgggaacagatgaagaagaaacagcaaaggaatctacagctgaaaaagatgaattgtaaattatactctcaccatttggatcctgtgtggagagggaatgtgaaatttacatcatttctttttgggagagacttgttttggatgccccctaatccccttctcccctgcactgtaaaatgtgggattatgggtcacaggaaaaagtgggttttttagttgaattttttttaacattcctcatgaatgtaaatttgtactatttaactgactattcttgatgtaaaatcttgtcatgtgtataaaaataaaaaagatcccaaataaaaaaaaaaaaaaaaaa

SEQ ID NO: 779 - DNA, 1092 bp, Homo sapiens
atgttcacgcacgggatccagagcgccgcgcacttcgtcatgttcttcgcgccctggtgtggacactgccagcggctgcagccgacttggaatgacctgggagacaaatacaacagcatggaagatgccaaagtctatgtggctaaagtggactgcacggcccactccgacgtgtgctccgcccagggggtgcgaggataccccaccttaaagcttttcaagccaggccaagaagctgtgaagtaccagggtcctcgggacttccagacactggaaaactggatgctgcagacactgaacgaggagccagtgacaccagagccggaagtggaaccgcccagtgcccccgagctcaagcaagggctgtatgagctctcagcaagcaactttgagctgcacgttgcacaaggcgaccactttatcaagttcttcgctccgtggtgtggtcactgcaaagccctggctccaacctgggagcagctggctctgggccttgaacattccgaaactgtcaagattggcaaggttgattgtacacagcactatgaactctgctccggaaaccaggttcgtggctatcccactcttctctggttccgagatgggaaaaaggtggatcagtacaagggaaagcgggatttggagtcactgagggagtacgtggagtcgcagctgcagcgcacagagactggagcgacggagaccgtcacgccctcagaggccccggtgctggcagctgagcccgaggctgacaagggcactgtgttggcactcactgaaaataacttcgatgacaccattgcagaaggaataaccttcatcaagttttatgctccatggtgtggtcattgtaagactctggctcctacttgggaggaactctctaaaaaggaattccctggtctggcgggggtcaagatcgccgaagtagactgcactgctgaacggaatatctgcagcaagtattcggtacgaggctaccccacgttattgcttttccgaggagggaagaaagtcagtgagcacagtggaggcagagaccttgactcgttacaccgctttgtcctgagccaagcgaaagacgaactttag

SEQ ID NO: 780 - DNA, 1567 bp, Homo sapiens
ggggtcctgccaccgcgccacttggcctgcctccgtcccgccgcgccacttcgcctgcctccgtcccccgcccgccgcgccatgcctgtggccggctcggagctgccgcgccggcccttgccccccgccgcacaggagcgggacgccgagccgcgtccgccgcacggggagctgcagtacctggggcagatccaacacatcctccgctgcggcgtcaggaaggacgaccgcacgggcaccggcaccctgtcggtattcggcatgcaggcgcgctacagcctgagagatgaattccctctgctgacaaccaaacgtgtgttctggaagggtgttttggaggagttgctgtggtttatcaagggatccacaaatgctaaagagctgtcttccaagggagtgaaaatctgggatgccaatggatcccgagactttttggacagcctgggattctccaccagagaagaaggggacttgggcccagtttatggcttccagtggaggcattttggggcagaatacagagatatggaatcagattattcaggacagggagttgaccaactgcaaagagtgattgacaccatcaaaaccaaccctgacgacagaagaatcatcatgtgcgcttggaatccaagagatcttcctctgatggcgctgcctccatgccatgccctctgccagttctatgtggtgaacagtgagctgtcctgccagctgtaccagagatcgggagacatgggcctcggtgtgcctttcaacatcgccagctacgccctgctcacgtacatgattgcgcacatcacgggcctgaagccaggtgactttatacacactttgggagatgcacatatttacctgaatcacatcgagccactgaaaattcagcttcagcgagaacccagacctttcccaaagctcaggattcttcgaaaagttgagaaaattgatgacttcaaagctgaagactttcagattgaagggtacaatccgcatccaactattaaaatggaaatggctgtttagggtgctttcaaaggagctcgaaggatattgtcagtctttaggggttgggctggatgccgaggtaaaagttctttttgctctaaaagaaaaaggaactaggtcaaaaatctgtccgtgacctatcagttattaatttttaaggatgttgccactggcaaatgtaactgtgccagttctttccataataaaaggctttgagttaactccctgagggtatctgacaatgctgaggttatgaacaaagtgaggagaatgaaatgtatgtgctcttagcaaaaacatgtatgtgcatttcaatcccacgtacttataaagaaggttggtgaatttcccaagctatttttggaatatttttagaatattttaagaatttcccaagctattccctcaaatttgagggagctgagtaaccccatcgatcatgatgtagagtgtggttatgaactttaaagttatagttgttttatatgttgctataataaagaagtgttttgcattcgtcaaaaaaaaaaaaaaaaaaaaaaaaaaaaaaaaaaaaaaaaaa

SEQ ID NO: 781 - DNA, 989 bp, Homo sapiens
cactcgttgcataaatttgcgctccgccagcccggagcatttaggggcggttggctttgttgggtgagcttgtttgtgtccctgtgggtggacgtggttggtgattggcaggatcctggtatccgctaacaggtcaaaatgcagatcttcgtgaaaacccttaccggcaagaccatcacccttgaggtggagcccagtgacaccatcgaaaatgtgaaggccaagatccaggataaggaaggcattccccccgaccagcagaggctcatctttgcaggcaagcagctggaagacggccgtactctttctgactacaacatccagaaggagtcgaccctgcacctggtcctgcgtctgagaggtggtatgcagatcttcgtgaagaccctgaccggcaagaccatcaccctggaagtggagcccagtgacaccatcgaaaatgtgaaggccaagatccaggataaagaaggcatccctcccgaccagcagaggctcatctttgcaggcaagcagctggaagatggccgcactctttctgactacaacatccagaaggagtcgaccctgcacctggtcctgcgtctgagaggtggtatgcagatcttcgtgaagaccctgaccggcaagaccatcactctggaggtggagcccagtgacaccatcgaaaatgtgaaggccaagatccaagataaagaaggcatcccccccgaccagcagaggctcatctttgcaggcaagcagctggaagatggccgcactctttctgactacaacatccagaaagagtcgaccctgcacctggtcctgcgcctgaggggtggctgttaattcttcagtcatggcattcgcagtgcccagtgatggcattactctgcactatagccatttgccccaacttaagtttagaaattacaagtttcagtaatagctgaacctgttcaaaatgttaataaaggtttcgttgcatggtaaaaaaaaaaaaaaaaaaa

SEQ ID NO: 782 - DNA, 605 bp, Homo sapiens
cccgcccagccagtcctcccgtcttgcgccgcggccgcgagatccgtgtgtctcccaagatggtggcgctgggctcggggtgactacaggagacgacggggccttttcccttcgccaggacccgacacaccaggcttcgctcgctcgcgcacccctccgccgcgtagccatccgccaggcgcgggggcgacgacaggttaaaaatctgtaagagcctgattttagaattcaccagctcctcagaagtttggcgaaatatgagttattaagcctacgctcagatcaaggtagcagctagactggtgtgacaacctgtttttaatcagtgactcaaagctgtgatcaccctgatgtcaccgaatggccacagcttgtaaaagtgccagcaggtttattttttgttttgcaagccagctctgcctccttacagtatgacatctgatgctggagggtcgcactttcaaaaatgagtcagctggtacatggggttatcatcaatttttagctcttctgtctgggagatacaagtttggaagcaatcttggggtacttacccacaaggctggtggagaccagatcaggagaacctcagtctgacgacattg

SEQ ID NO: 783 - DNA, 1175 bp, Homo sapiens
aggaggggccatccaatccctgctgccacctcctgggatggagccctagggagcccctgtgctgcccctgccgtggcaggactcacagccccaccgctgcactgaagcccagggctgtggagcagcctctctccttggacctcctctcggccctaaagggactgggcagagccttccaggactatggttggactgaagccttcagacgtgcctcccaccatggctgtgaagttcctgggggcaggcacagcagcctgttttgctgacctcgttacctttccactggacacagccaaggtccgcctgcagatccagggggagaaccaggcggtccagacggcccggctcgtgcagtaccgtggcgtgctgggcaccatcctgaccatggtgcggactgagggtccctgcagcccctacaatgggctggtggccggcctgcagcgccagatgagcttcgcctccatccgcatcggcctctatgactccgtcaagcaggtgtacacccccaaaggcgcggacaactccagcctcactacccggattttggccggctgcaccacaggagccatggcggtgacctgtgcccagcccacagatgtggtgaaggtccgatttcaggccagcatacacctcgggccatccaggagcgacagaaaatacagcgggactatggacgcctacagaaccatcgccagggaggaaggagtcaggggcctgtggaaaggaactttgcccaacatcatgaggaatgctatcgtcaactgtgctgaggtggtgacctacgacatcctcaaggagaagctgctggactaccacctgctcactgacaacttcccctgccactttgtctctgcctttggagccggcttctgtgccacagtggtggcctccccggtggacgtggtgaagacccggtatatgaactcacctccaggccagtacttcagccccctcgactgtatgataaagatggtggcccaggagggccccacagccttctacaagggatttacaccctcctttttgcgtttgggatcctggaacgtggtgatgttcgtaacctatgagcagctgaaacgggccctgatgaaagtccagatgttacgggaatcaccgttttgaacaagacaagaaggccactggtagctaacgtgtccgaaaccagttaagaatgg

SEQ ID NO: 784 - DNA, 6885 bp, Homo sapiens
  misc_feature (3219)..(3219): n is a, c, g, or t
  misc_feature (3704)..(3704): n is a, c, g, or t
tcaagaccaccctggctaacacggtgaaaccctgtctctactaaaaatacaaaaaattagccgggcggggtggtgggcgcctgtagtcccagctactcgggaggctgagggaggagaatggcgtgaacctgggaggcggagtttgcagtgagcagagatcgcgccattgcactccagcctgggtgacagacagagactctgtctcaaaaaagaaaaaaaaagaaaaaaagaaaaagaaagtgtggtctctgttgcctacatcaccatcaccttgagtcctacatcctttgaatgagtcttgggggtgtgccctagaaaatcattggccaattcccgaagccagtacatgtagaagccaaatctgagttatgcaaatacattatttttctattgttcaacttacctctatttgggtctccattctacctgcctgcaagaaaacattctctcagtcacttccaggtgaactccgtcatcccactccttctcccacctccaccattgatctaaatttggggagttcctctgagccacagcctaggtggggtggggtgggaaggggctgctggatgagagtcctctttctgagatgaatcctcctgggcccttcatctccgtgggtcacacatgccctcatttctactctgctgctgccgtccccacgatccaatagcaatagcacgacccctggccttgaccgtgtatctggggctctgtcccttccacatcacccccaaaccagcatcaaatgtcttgtctggctctgcactaggctcccctcagttagtgcaggggtgtccaactgggggcggaagggcttcctgtgcctgcctcttccaatcctccatgtcttatttataccctgacagacatgaagggttttgaacttaaaaggctgggaatttggcatcttttgttctctgactaagaaagaggaaatcatttcaagaccaaaaagcagggagccagcatctcacagcatggatctgagaccccccgtggaagctgctcttttctttctcatcacataagcgtgagcccgggactgtcagtgcacaaggaccagggacgcggctgctcctctgagggggaggaagccaagagtatcttctcttagattgggctgagttcccacacccagcacacacattccctgctcactcacctcccacagacagctgggaaatgacacctctggtgacagagccactctccgggcttctgtggggagcgggtggggcactgcagtgggggaggatctcacacccggaggccctgggaagccagggtgggggagggaggaagctggttcctgtttgtcttagagatcaaggccatcagcctccctgcaccttccagggatgtagtaagcacccccaccccagggccaaagggcctcgcctaaaatgcctcctgcacccttgaggcttgctttgaccccctgcactccaccaagagcgacagctcccctgggtcccatcttctctgacaagctgggtgggagtgtatacagctgctgggtgtgcttagagggcctaatggagaccagccagggataatctcctatgttatccacatcaagccatttaacaaatatggatttagtacctacatatgcaatgtatttggggtccagagagaggagggcaacggtccaaggtcacacctgcgaggcgaatacgcatgtaaagcagcaccttgtaacctgtgcccactgtgcctactactaaagaaaaataaatgagagaaaaagaaaaaaggctttttttttttttggcccaggccctgtgcctgggaccaaagcctgagccctttcctgcagtcgggtcgctgacctaagcctggggcaaagctaggtcttggccagtcagcagccaccacgtgaagcagcccctgcccccatcacccccggcagccttgtgccctcctcctcggggtcctcagctcaccccacctcagtcgggcctgctccagcggttaagtacccctagtctgaaccttaatcgtgaggcggggcagccccctccccacaccctgtagacactcccccgtcctccgccccctggacttgtttgggcgggaagagcctgcctcatcttttcttcctaccctcctacccagtggccagggaccccaggcttcctctgagacatccaccagcggtgatgggttgggaccaatctcccccactcctctccaccctagcagtaaggtccccgctctcgatactgccccagcacctgcactggccctctctgatttcccaactccagcccattccaagtgctgaaggcgggtcgctaggtgctgggacctgggcgcggggcaagaccttgggctgtgtggggtgcaggctgggtttactgggttcacgattgagggagtggtctgggggttaggtgtagggccaggctgcgttgtgctctaaggggcaggcggcaggcggtttgggggggctgtggtcagacagggtggggtggcggtgggtttggggaagccgcagcagcccgccttggggtcccgcgagtgccgagggagctgccggggcatggtggcgcggggcccgtggtcctgcccggcacgacccccgccccgcagcgccccgcagcgccccgcccccgcggccccgctcgcgacgcgtctcccgcggcgccccgcccccgcccgcagtgcccggatgcgggtgacgcgcggccgccatctttccgtcccgggcagccagcgccagtcggagccagcgcgagcgccgccgccatcactgccgctgccaagtcctccacccgctgcccccgccatgtgagtcggccgcccgccaccctcaccgcgcttccctgcgccggccgccgcccttggcaaccggccgtcgggagtgcccggggtctcttctgcgttccccgcgccccggggccaggcccaagccggtgactgcgcgcgggcggccgaggagccccgcgtcccgggctggccggctcgggcgatggccgcgggaaggagcggacccagtgtcctcctgcccctccccgcccctgtcaccgcggccgcctgtcttttcgggtcgacccggatcgcatctgtgaggtcgccctcagttgacaggcggggaaactgaggccgggggggcctcgctcaaggtcacgcagctcatcggcggcagggctggaccgagaccagggcttacatcgggtggccttcctcccgaaaaggaggactggagggacnaggatggacaggtggatgggcggagccctggctgcggggccgggaggctgcaagccctgggtcttaatccgtccctgctcctcaggtctgctaccgctgccacggccccccctgctgccccggctggggagggtggtccccctgcaccccctccaaacctcaccagtaacaggagactgcagcagacccaggcccaggtggatgaggtgagtgtggggggagtcaaaaccagtaggagggcccctgggggttggggataggtgtaggggcccattttggtttgggagtgatgacagttcacgcctttgggtttgcggacaaagataccatgccccatccctgtctccctgtcagcacgcacttggaagggcgctgggggtgttaatcagctttgctagcctggggtgtgccagcctgggcaggtgtgctctggtgatggacagagcgcctgaggttccatagagggagggtgttgctatgacatntgagatgtcaccagcatgcccctgatgtgtgctccttgcatgtccccaggtgtgctaggcatgttctgtgtgtccttggcatgttaacctggcagtatcagggtgcatgttccatgtgtggcacggtgggcacatgtttgaggattgccctcactgaggtgggccttggcacacccccctgcctcgtgggcccttctcccaggtggtggacatcatgagggtgaacgtggacaaggtcctggagcgagaccagaagctgtcggagctggacgaccgtgcagatgcactccaggcgggggcctcccagtttgaaacaagcgcagccaagctcaagcgcaaatactggtggaaaaacctcaaggtaagggtggggacaggaaggaggacaggtgggtgaatggggtatcatagtttgtcttactgatcctcgcctctcacccccagatgatgatcatcttgggagtgatttgcgccatcatcctcatcatcatcataggtgagtagggtgagaatggccggggccctttccctggagaggtttccccagtggattctaggttttgaaggtcattaatctagtttttactcttcagccaaaaacacatatagctgctaatggcaattctgattcatctagagccaaaaactttgatgttatttagcctgcattttgcctagttcttggcagtcttgttaacatttggaaataggaaagctggtgtatccattgaggaccctttaggcctaagagcccagtctgagaaccctggaattgaggagtgggagaaaggaaaggaccaggggcttgagacatgaccaggaagccaaccaccccattatttgagagcttgcggtctcagaggctcagaggattagggtctgtggcttcaaggccataccatggagcggaagggacctcagaacctacctgtctagccccttgctttgtagatggaaaaactgagtccaagagagggtgtcagccagctggggagtggggaggattggagcagggccaggcctgacacactgctttcttgttctctctctttctctcccctctccctcttcctcatcttcttcccctctctccacagtttacttcagctcttaaatccccgaggagtctgccctgcctagagaagggcctctcccccaaccctcagccgttcctccacctctcagccatatctttcagccccccctcccctggatccgtgtgtgtgtgtgtccgtgtgtgtgtccccctgtaaatagccagctgttatttatacatatataatattatatatatttggtctgtttgtagttttattactagatgatttttccggttgtccttaacaccccttcctgaggttcccttcacccctctctcttgccttccttccctttccctttcttcctgactagccccaagtcccttcatttgcatctgctatgcaatagtccctctcctttccttcttcttccctcagatttagctgatccttcctcccaccctggccttcctttcctctttcctcctcactctccccgtcatgctccctctgccccgccctcaaaaaaaaaaaaaaaaaaaaaaaaaaaaaaaaccaccagcacctgtccaggcttccttaggtacatcttctttgtatccattgggaggctctgagactggccccacttggtcctaaaaatcccaaggtctttgggagcgtccagcatgttaattagcgtatcattacatactgctatccctttccatttctttttgttccatcactcttctctcaacctgtgtttctttttttactgaggagttagtccccattagttcttgtatcacattttcatttgcacgacattactcgcaggtggtggggagcctgggcttttggggaaccaggctgctctggtccccagcattgcctcctcctagcccctctagtccagtttgcctcccttaccctcattttccaaacctcttgtaccctcctctccctcccccagtggtatgtaagtgtcttgaagttcagtatgttatgatggaccaataattctgcccttcgggtttctccctacattcctgctccccagttttcatgtggggtactcaactgacattcccatggggtttccctcccatctgcctgatccacctcctcctcccaccacaagatcaattgttggccacaattgatctcttgtagaggggtggctaccagtgtgtgtgtgggggtcatcactgccttggggaggagtggggcagggcagagaatccccccaattcctgcctgaaatctctggcctcacccctgctgggggttggactgaaaaccctcctccccaatttggggggtgttgccccatcactgcccagctcctctgactgccccccctgaatttagggtgggggtactagtcactgccaatgtgtgtatgggacttgctggaaaacggggatgcttgcccctctccaggactattgagcccagagagagctgtcctctcattgggtgaactgattgaggaagggtctattgtctttttaaatggcacaattttaagggtttgagggtacagtcccttaacctgccacgggagggggcccccaaactttcttcccccccacacttctggttttctgtgtggagggggagcagggatatctaagctgtggtgtgaaagggtaggagagatgctggaggtgggggtgctgtgttctagaccccccatattatcccagtgtcccctgcccccctcttcccccaccccatgcccccaattctgtggcgcatccagattgtgaaaatgtacaataaatgtgtaatgagtaaccaggtgttgtctaagatcttttttatttttctattttttttttttggttgggggagaataagatcttttcttaaccaatgggaataatattggatcggaaggtataccaggaaggttgagaagatacattggtaatggactggactttgcaagaggccctgaccttgggcagggcaaagtgtgattctcaaagtggccacaggggggcactaggagttggtaatgggaagtgtcatagccagcccgtgtctctaagcccggtgcgccctatggtctagggttcccagctttcgtttccctttactggggcatgttcctgctgttggactcctttctactcctcgatttaacttctaga

SEQ ID NO: 785 - DNA, 2670 bp, Homo sapiens
gtgccagctgtgtgagaagccgggcagcctcctgctctgtgaaggaccctgctgcggagctttccacctcgcctgccttgggctttcccggaggccagaagggaggttcacctgcagcgagtgtgcctcaggtgtcgcccggcacagtctggggtctgtgaggatgatgagaggacacctgcacagccgtggcccttcctgcctactcaccgggcccaaggagtctcctatctcacgtcagaacacttcctgggtcaggaagacacctggagagtctcccaggccatggcagccccacagcagcacctcacttatgggagtgtctgtctgcctgcccagaatgataagtgactgctccaccactggccagctgctctcaaggaggaaaggcctcttttcataggagccccttctttcaagcttcttgccagttagactgggcctccccagccaggctgcctagtaagattctcctgtatttcaggtgaagctggagctcagatcgcagcaaggtaatccttgatggctggatctttttgctggagaatgcttggactagtgagcaaggttggaaacagggccaggtgctttagcagcgtggctgcctctgaagaggagttgcttgattttagtggctcagaactgcaatttaattcttgttctttgcacctctctctccaccccttctttaactttttgttagggattcactcatgtttcgtgtgtaaagagagcaagacagatgttaagcgctgtgtggtaactcagtgtggaaaattttaccatgaggcttgtgtgaaaaaataccctctgactgtatttgagagccgaggtttccgctgccccctccacagctgtgtgagctgccatgcttccaacccttcaaacccaaggccgtcaaaaggtaaaatgatgcggtgtgtccgctgccccgttgcctatcacagcggggatgcttgtctggcagcaggatgctcagtgatcgcctccaacagcatcatctgcactgcccacttcactgctcggaaggggaagcgacaccacgcccacgtcaacgtgagctggtgcttcgtgtgctccaaaggggggagccttctgtgctgtgagtcctgcccagcggccttccaccctgactgcctgaacatcgagatgcctgacggcagctggttctgcaatgactgcagggctgggaagaagctgcacttccaggatatcatttgggtgaaacttgggaactacagatggtggccggcagaagtttgccatcccaaaaatgttcccccaaatattcagaaaatgaagcacgagattggagaattccctgtgtttttctttgggtctaaagattattactggacgcatcaggcgcgagtgttcccgtacatggagggggaccggggcagccgctaccagggggtcagagggatcggaagagtcttcaaaaacgcactgcaagaagctgaagctcgttttcgtgaaattaagcttcagagggaagcccgagaaacacaggagagcgagcgcaagcccccaccatacaagcacatcaaggtgaataagccttacgggaaagtccagatctacacagcggatatttcagaaatccctaagtgcaactgcaagcccacagatgagaatccttgtggctttgattcggagtgtctgaacaggatgctgatgtttgagtgccacccgcaggtgtgtcccgcgggcgagttctgccagaaccagtgcttcaccaagcgccagtacccagagaccaagatcatcaagacagatggcaaagggtggggcctggtcgccaagagggacatcagaaagggagaatttgttaacgagtacgttggggagctgatcgacgaggaggagtgcatggcgagaatcaagcacgcacacgagaacgacatcacccacttctacatgctcactatagacaaggaccgtataatagacgctggccccaaaggaaactactctcgatttatgaatcacagctgccagcccaactgtgagaccctcaagtggacagtgaatggggacactcgtgtgggcctgtttgccgtctgtgacattcctgcagggacggagctgacttttaactacaacctcgattgtctgggcaatgaaaaaacggtctgccggtgtggagcctccaattgcagtggattcctcggggatagaccaaagacctcgacgaccctttcatcagaggaaaagggcaaaaagaccaagaagaaaacgaggcggcgcagagcaaaaggggaagggaagaggcagtcagaggacgagtgcttccgctgcggtgatggcgggcagctggtgctgtgtgaccgcaagttctgcaccaaggcctaccacctgtcctgcctgggccttggcaagcggcccttcgggaagtgggaatgtccttggcatcattgtgacgtgtgtggcaaaccttcgacttcattttgccacctctgccccaattcgttctgtaaggagcaccaggacgggacagccttcagctgcaccccggacgggcggtcctactgctgtgagcatgacttaggggcggcatcggtcagaagcaccaagactgagaagccccccccagagccagggaagccgaaggggaagaggcggcggcggaggggctggcggagagtcacagagggcaaatagcgccag

SEQ ID NO: 786 - DNA, 2041 bp, Homo sapiens
cccgtgcaggctgtggagactcccttcccgggggagggggcccccactgccgcaggtgccccctctgcctccaccccggctcctggccagaagctggagggggcttggccaaaaagagggagaaacaactcagctgttctttctagctctgaaatagaaaatgtctgcagacggcggaggcatccaggacacccaggacaaggagacacccccggaggttccagatcgtggacatcctcatcaggaaatgccttctaagctgggggaggcggtaccttcaggggacactcaggagtcactgcacattaagatggagcccgaagagccacactccgagggggcatcgcaggaggatggggctcaaggtgcctggggctgggcacccctaagtcacggctctaaggagaaagctctcttcctgcctggcggagccctcccctccccccggatccccgtgctttcccgagaggggaggaccagagaccggcagatggctgcagcgctcctcactgcctggtcccagatgccagtgactttcgaggatgtggccttgtacctctcccgggaggagtggggacggctggaccacacgcagcagaacttctacagggatgtcctgcagaagaaaaatgggctgtcactgggctttcccttcagcaggcctttctgggcccctcaagcgcacggcaagggtgaggcctcgggctccagccggcaggcaggagatgagaaggagtggagaggcgcgtgcacaggagccgtcgaggtggggcagagggtgcagacctcatccgtggcagcccttgggaatgtgaagcccttcagaaccagggcagggagagtccagtggggcgtcccgcagtgcgcgcaggaagcagcctgcggccggagctcagggccggccaaagactccgggcagccggctgagccagatcgcaccccggatgcagctccgccagaccccagtcccacggagccccaggagtaccgcgtcccggagaagcccaacgaggaggagaagggcgccccggagagtggcgaggagggcctggcccctgacagtgaggtgggcaggaagagctaccggtgcgagcagtgcggcaagggcttcagctggcactcgcacctggtgacgcaccggcgcacgcacacgggcgagaagccctacgcctgcactgactgcgggaagcgcttcggccgcagctcgcacctcatccagcaccagatcatccacacgggcgagaagccctacacctgccccgcctgccggaagagcttcagccaccactccacgctgattcagcaccagcgcatccacaccggagagaagccctacgtgtgcgaccgctgcgccaagcgcttcacccgccgctcggacttggtcacccaccagggcacccacacgggcgccaagccgcacaagtgccccatctgcgccaagtgcttcacgcagagctcggcgctagtcacccaccagcgcacccacactggggtcaagccctatccgtgccccgagtgcggcaagtgcttcagccagcgttccaacctcatcgcgcacaaccgcacacacacaggcgagaagccctaccactgcctcgactgcggcaagagcttcagccacagctcgcacctcaccgcgcaccagcgcacccaccgtggcgtgcggccctacgcctgcccgttgtgtggcaagagcttcagccggcgctccaacctgcaccggcacgagaagatccacaccaccgggcccaaggccctggccatgctgatgctgggggcggcggcggcgggggctctggccacacccccacccgctcccacctaggaggccaggaaagggggagcggggcgcccagggccactggaacagccccactggagtcaaggctccgagggaggagagaggggctcgggaagggagctggggcggtgagggcatggggtgaggcatggcgatgggggagggcgagggcgagaaagggcaggcactctgcgaattaaaggccttggacttgaaaaaaaaaaaaaaaaaaaaaaaaaa

SEQ ID NO: 787 - DNA, 2587 bp, Homo sapiens
gcgcacgtacacacgaagggcctgctgactacatctgccggaaagcatcgggccaagcctttctccattttgcggtctaggaagtagcagaggccccttcctgtagggagttgccatggagacgcggtggggcaccgacggagttctaatgacggccgtgattggtgcaggatcctgctaatctcaggaaggcccgtagagaagggcagacactggcctcagatacctgacctggtaccctctatgaggcctgcggtgctgggctccccagaccgagcacccccagaagatgaggggcctgtcatggtgaagctagaggactctgaggaggagggtgaggctgccttatgggacccaggccctgaagctgcacgcctgcgtttccggtgcttccactatgaggaggccacagggccccaagaggccctggcccagctccgagagctgtgtcgccagtggctgcgtccagaggtacgctccaaggagcagatgctggagctgttggtgctggagcagttcctgggcgcactgccccctgagatccaggcccgtgtgcaggggcagcggccaggcagccccgaggaggctgctgccctagtagatgggctgcgccgggagccgggcggaccccggagatgggtcacagtccaggtgcagggccaggaggtcctatcagagaagatggagccctccagtttccagcccctacctgaaactgagcctccaactccagagcctgggcccaagacacctcctaggactatgcaggaatcaccactgggcctgcaggtgaaagaggagtcagaggttacagaggactcagatttcctggagtctgggcctctagctgccacccaggagtctgtacccaccctcctgcctgaggaggcccagagatgtgggaccgtgctggaccagatctttccccacagcaagactgggcctgagggtccctcatggagggagcaccccagggccctgtggcatgaggaagctgggggcatcttctccccagggttcgcgctgcagctaggcagcatctccgcaggtccaggtagtgtaagccctcacctccacgtcccctgggacctcggcatggctggcctttctggccagatccaatcaccctcccgcgaaggtggctttgcgcatgcgcttctgctccccagcgatctgaggagtgaacaggaccccacggacgaggatccctgccggggtgtgggccctgctctgatcaccacccgctggcgctcccccaggggccggagccggggccgccccagcactgggggcggggtggttaggggcggccgttgcgatgtatgtggcaaggtgttcagccaacgcagcaacctgctgaggcaccagaagatccacacgggtgagcgaccattcgtgtgcagcgagtgcggccgcagcttcagccgcagctcgcacctgctgcgccaccagcttacgcacaccgaggagcggccgttcgtgtgcggcgactgtggccagggcttcgtgcgcagcgcgcgcctggaagagcatcggagagtgcacacgggcgaacagcctttccgttgcgctgagtgcggccagagcttccggcagcgctccaatctgctgcagcaccagcgcatccacggcgatcccccgggccctggcgctaagcccccggcccctcctggtgcgcccgagcctcccggcccctttccgtgcagcgagtgccgcgagagcttcgcgcggcgcgccgtgctgctggagcaccaggcggtacacacgggcgacaagtcctttggctgcgtcgagtgcggcgagcgcttcggccgccgctcagtgctgctgcagcaccggcgcgtgcacagtggcgagcggcccttcgcctgtgccgagtgcggccagagcttccggcagcgctccaacctgacgcagcaccggcgcatccacaccggggagcggcccttcgcctgcgccgagtgtggcaaggccttccgccagcggcctacgctcacgcagcatctccgcgtacacacgggcgagaaaccctttgcctgccccgagtgtggccagcgcttcagccagcgcctcaagctcacgcgtcatcagaggacacacaccggcgaaaagccctaccactgcggtgagtgcggcctgggcttcacgcaggtctcgcggctcaccgagcaccagcgcatccacacgggcgaacggcccttcgcctgccccgagtgcggccagagctttcggcagcacgccaacctcacccagcaccggcgcatccacacgggtgaacggccctacgcatgccctgagtgtggcaaggccttccgccagcggcccacgctcacgcagcatctgcgcacccaccgacgagagaagcccttcgcctgccaggactgtggccgccgcttccaccagagcaccaagctcattcagcaccagcgcgtccacagcgccgagtagctccagccgggacgcactgtgtccgccatggtcagaacacctacctcccctggttattgtgaggctggcgattacataagtataagcaggtccgcccagggcttggctactgtaggtgtccaataaacagtagatggaa

SEQ ID NO: 788 - DNA, 5023 bp, Homo sapiens
ggcgaatagcgccggctaggtcttccaacctctaggtggggtgccagccggggcgggcccagcaccccggccgggcagtactttttttttttttgcatacaccagttctcaggatatcggaatccggtgcacagcagcttcttcaggtttgaggttccggatgcctgggggcggagaaacgggaggggaaaaacagatggcaaggtgaggcgtccatggaacgacttctggcccagctgtgcggcagcagcgcagcgtggccgctcccgctgtgggagggggacaccacaggccactgcttcacccagctggtgctcagcgccctgccccacgcgctcctcgccgtgctcagtgcctgttacttgggcaccccgaggagtccagattacatcctaccctgcagtcctggatggcgcctccgacttgcagcttccttcctgctttccgtcttcccgctgctagaccttcttccagttgctttgccaccaggggcaggcccaggacccatagggctagaggtgttggcagggtgcgtggcagctgtggcctggatcagccacagcctggccctgtgggtgttggcacattcccctcatggccactcccggggtcccttggccttggccctggtagccttgctgccagctccagccctagtgctgaccgtgttgtggcattgccagcgaggcacacttctgcccccacttctcccagggcccatggcccgcctatgcttgctcatcctgcagctggctgcactcttggcctatgcactgggatgggcagctcctgggggaccacgagaaccctgggctcaggagcccctcctgcccgaggatcaagaacctgaggtggctgaagatggggagagttggctgtcacgcttttcctatgcctggctggcacccttgctggcccgtggggcctgtggagagctccggcagcctcaggacatttgccgcctcccccacagactgcagccaacctacctggctcgtgtcttccaggcacactggcaggagggggcacggctgtggagggccttgtatggggcctttggacggtgctatctggcacttggactgctgaagctggtggggaccatgttgggattctcagggcccctgttgctctccctactggtgggcttcctggaagaggggcaggagccactaagccacggcctgctctatgctctggggctagccggtggggctgtgctgggtgctgtgctgcagaatcagtatgggtatgaggtatataaggtaacacttcaggcacggggggctgtgctgaacatcctgtactgcaaggctttacagctggggcccagccgccctcctactggggaggccctgaacctactaggcactgactctgaacggctgcttaactttgctgggagcttccatgaagcctggggcctgcccctgcaactggccatcaccctctacctgctgtaccagcaggtaggcgtggccttcgtgggtggtctcatcttggcactgctgctggtacccgtcaacaaagtgattgccacccgcatcatggccagcaaccaggaaatgctacagcacaaggatgcgcgggttaagcttgtgacagagctgctgagtggcattcgggtcatcaagttctgcgggtgggagcaggcactgggagcccgagtagaggcctgccgggctcgagagctggggcgactccgggtcatcaaatacctggatgcggcctgtgtatacctgtgggctgccctaccggttgtcatctccatcgttatcttcatcacctatgtcctcatggggcaccagctcactgccaccaaggtgttcacggccctggcactggtgcgaatgctcattcttcctctcaacaacttcccttgggtgatcaatggtctcctggaggccaaagtgtccttggaccggatccagcttttcctcgaccttccaaaccacaacccccaggcctactacagcccagatccccctgcagagccatctacagtattggagctgcatggagccttgttctcctgggacccagttggaaccagcctggagaccttcatcagtcatctcgaagtgaaaaagggtatgctggtgggcatcgtggggaaggtcggctgtgggaagagctccctgctggctgccatcgctggagagctccacaggctgcgtgggcatgtggcagtgcgggggctgtccaagggctttggcctggccacccaggaaccctggatccagtttgccaccatccgagacaacatcctctttgggaagacatttgatgcacagctgtacaaggaggtgctagaagcctgcgccctcaatgatgacctcagtatcctgcctgctggagaccagacagaggtgggggagaagggtgtcacccttagcggaggacagcgtgcccggattgcccttgctcgtgctgtctaccaggaaaaggagctctatctcctcgatgaccctctggccgctgtggatgcagatgtggccaaccacctgctgcacaggtgcatcctgggcatgctgagctacaccacacggctgctctgcacccaccgcactgagtacctggagagggctgacgcggtgctgctgatggaggccgggcgcctcatccgggctggacctccctctgagattctgccactggtacaagctgtccccaaagcctgggctgagaatggacaagagtctgactcagccacagcccagtcagtacagaacccagagaaaacaaaggaggggctggaggaggagcagagcacatctggtcgcctgctgcaggaagaaagcaagaaggagggcgccgtggccttgcacgtgtaccaagcttactggaaggccgtgggccagggcttggccttagccatcctcttctctctgcttctcatgcaagccacgcggaacgctgctgactggtggctctcccactggatctctcagctgaaggctgagaatagctcccaggaggcgcaaccctccaccagcccagcttctatggggctcttctctccgcagctgctcctcttttcccctggaaacctctacatcccagtgttcccactgcccaaagctgcccccaatggctcctcagacatccgtttctacctcaccgtgtatgcgaccattgctggtgtaaattccctctgcacccttctccgggcagtgctctttgcagcaggcacccttcaagcagctgccactctgcatcgccgcctgctgcatcgagtccttatggcaccagtgactttcttcaatgccacacccacgggccggatcctaaaccgcttctcctctgatgtggcctgtgcggatgacagcctgcccttcatcctcaacatcctcctggccaacgcggcaggcctgctggggctcctggccgtgctgggctctggcctgccctggctgctgctcctgctgccgcctttgagcatcatgtactatcacgtgcagcgccactacagggcctcctcacgggagctgcggcgcctgggcagcctcaccctgtctccactgtatagccatctggccgataccttggctggcctctctgtgctccgggccacaggggccacctacaggtttgaggaggagaacctgcgactccttgagctaaaccagaggtgccagtttgccaccagtgccacaatgcagtggctggacattcggctacagctcatgggggcggcagtggtcagcgctatcgcaggcatcgctctggtgcagcaccagcagggcctcgctaacccagggctggtgggcttgtcgctgtcttatgccctgtccctgacgggcctgctctcgggcctggtgagcagcttcacacagacagaggccatgctggtgagcgtcgagcggctggaagagtacacctgtgacctgccccaggaaccccagggccagccactgcagctgggcaccggctggctgacccaggggggcgtggagttccaggacgtggtgttggcgtaccggccagggctgccgaatgccctggatggagtgaccttctgcgtgcagcctggagagaagttgggcatcgtgggccgcacaggctccggcaagtcttccctgttgttggtgctcttccggctgctagagcccagttcagggcgagtgctgctggacggcgtggacaccagccagctggagctggcccagctcagatcccagttggctatcatcccccaggagccctttttgttcagtgggactgttcgggaaaacctggacccccagggcctacataaggacagggccttgtggcaggccctgaagcagtgccacctgagtgaggtgattacatccatgggtggtctggatggtgagctgggtgaggggggccggagcttatctcttgggcagaggcagctgttgtgtttggccagggctctcctcacagatgccaagatcctgtgtatcgatgaggccacagcaagtgtggaccagaagacagaccagctgctccagcagaccatctgcaaacgctttgccaacaagacagtgctgaccattgcccataggctcaacacgatcctgaactcagaccgggtgctggtgctacaagcggggagagtggtagagctggactccccggccaccctgcgcaaccagccccactccctgttccagcagctgctgcagagcagccagcagggagtccctgcctcactcggaggtccctgagcccaatcccacaccctgcagagttctcccctctctctgatccaggccgggcctatacagaggtgctggctgcttgtttacattctcctctggggctctacctctccacacttccccagaagggaaaagggcaccctggattactctttggaaatcactccttggtgggcagcatcctgaggcttccccagaaccaggcctctgctctggccctcttgcatctggaacgccaggtgggtttttctggcataggagcccacttgcattttcatagttttatttgataaaattccatcttacattctgtgtattaaaaaaataatatttct

SEQ ID NO: 789 - DNA, 184666 bp, Homo sapiens
gaattctctccctcccatctgtggctgagattaaagatctgcacctgaagcactgaagaatgtgtgggtaattaaattaccctgccgattcctggagatgctgattacctggagatgacctcagagattatcctaaattaactcctacaagacacacattgcagcgggaggtgaggtaggggaaggattgtgcacctgaggctagcaaaggtttccactctgtttagagatgatgtcaccagtgcgtttacatttgcgttgtgttcacacattgagtgctactatgtacaagaccatgtgtcagacactgaggtaacaggtatagctactagatagagttcatagctatggaggcaagcagattcactgactgctaattctaacatgatgtgacagtgcaactagaaaaacataaacaagcactatgtgagcacaaagaaggtgcacatcaactccttacaggtacctgtaaaagccaaagggtaacagttggattgcaccttgaagaggatgcacttttttttttttttaagacagaatctcactctgttgcccaggctggagtgcagtggggcaatctgggctcacttcaacctctacctcccgagttcaagcaattctcctgcctcagcctcctgagtagctggtactagaggcatgcgccatgatgctgggctaatttttgtattttcggtagacgtgaagtttcaccaagttggccaggctggtcttgaactcctgacctcaaatcatccacccacctcagcctcccaaaatgctgagactacaggcgtgagccaccgcgcctgacctggatgtaagattttgataggtacagaacaaggaaaagactttccaggccgggcacagtggcttatgcctgtaatcccagcactttgggaggccgaggtgggcagatcacgaggtcagcagttcaagaccagcgtggccaacatggtgaaatcccatctctactaaaaatacaaaaattagccaggcatggtggtgggtccctgtaatcccagctactccggaggctgaggcaggagaattgcttgaacctgggaggtggaggttgcagtgagcaaagaccgcgccactgcactccagcctgggtgacagagggagactccgtctcaaaaaaaaaaaaaaaagactttccagaaggagcagcataaacacaggcatgacatgtttccataatggcaagtggccctaaatgactagaatataaggtagatccagtaggaaaggacttagaaggggctttggaaggtgagtctggaaattaaaactggggtaaacgtgatggaccctgaacatcattatactgcttaagatgctaatcttaatcctgaaggtaatgggaaaacctcctaaggtttatgttattttctttctacttaggctatttaaaaagtggagtgacggccaggcgcagtgactcatgcctgtaatcccagcactttgggaggccgaggtgggcggatcaccaggagttcgagaccagcctgaccaacatggtgaaaccccgcctctactgaaaatacaaaaattagccaggtgtggtggtgggcgcctgtaatcccagctacttgggaggctgaggcagaagaattgcttgaacccgggaagtggaggttgcagtgagcagagatcgtgccattgtactccagcctgggcaacaagagcgaaactcagtcacaaaaaaaaaaaaaaaaaaaaaggagtgacatgcttagatctctgttttggaatgacaggttttttgtttctagcatcaatccaaggttcatggcttgagaaggtgtactgccagcaatgccattaaccagcaaagggaatgcaggaagaggaacagatctggtgggcatcagtttggatgctctgagtttgagctgcctgtgaaaactgcaggtggtgatatgcaattaacattcacatacggagttcaaaactagagacacaaatttgagagtcatcacagaaatgtgaagtgtgttttctataactaaagataaccatgctaacatagccatgtgttacattagcattttttttttttttgagacggagtctcactctgttgcccaggctgaagtgcagtgcacaatcttggctcactgcaacctccacctcctgggttcaagcgattctcctgccttagtctcctgagtagctggaattacaggcacctaccaacacgcttggctaatttttgcattttagtagagatggggctttaccatgttggccagctggtctcaaactcctgacctcaagtgattcacccaccttggccccccaaagtgctgggattacaggtgtgagccactgtgcccggccttacattttgtgttttttcctgctgcttgtatgtgtgcaagtctgtgtatcatcaatgggtatatgtgtacctgcgctgacaacaaaaaatgagatgcatatcagctactacacaaagctgttataaggatgaaatgcagttagccagtgctcagtaaagggcagttgctttactactactaggtggggtggtgtatgtgagaatctgtatactgccattagtaggctttagtatgtagtgtgcatatggaattcatgcattagtgtgtagtatgtgtgggacccactcacctgagcagcttctctccccacttacagtggcatctgttgaggattcctgtgagggataaggcagggagtgaacttgttacaaggcagggacagggaatggaatgtgtttatgtgtctaagctgaggcatccaggtcagaggtgctggttgttgaggaagctggcctgggagggcacaaaggcagccaaagctggtgcctggccacaaatatgagctgggattaccgtacatggagatgggggaagggatggacactcacagggacacttagccagaaaaatacacaaagcagacctagttaaaactcaagaactggccaggcacggtggctcacgcctgtaatcccagcactctgggaggccgaggcagacggatcacgtggtcaggagatcgagaccatcctggctaacatggtgaaacgcagtctctactaaaaatacaaaaaattagccgggcatggtggcaggcacctgtagtcccagctactcgggaggctgaagcagaatggcatgaacccgggaggcagagcttgcagtgagcggagatcgcgccactgcactccagcctgggtgacagagcaagactccgtctcaaaacaaaacgaaacaaataaacaaacaaacaaaacacaaaaaactcaagagccctcccgcccctccaaaaatacaaaaactcaatagctggccgggcagggtggctcatgcctataatcccagcactttgggaggccaaggcaggaggatcacttgagctcaggagtttgagaccagcctgggcaacatggcgaaacaccatctctactaaaaatacaaaaaaattagctgggcatggtggtgcaggcctgtagttccagctattcaggaggctgaggtaggatgaggcagaagaatcacttgaacccaagaggcggaggttgcagtgagcctaaattgtaccactgcactccagcctgggtgacacagcaagattccatctaaaaaacaaacaaacaaacaaaaaactcaagagcccaacacacatatgtaaaaaactggacggccgggcgcggtcgctcatgcctgtaatcccagcaccttgggaggctgaggcgagtggatcccctgaggtcaggagttcaagaccagcctgggcaacatggtgaaaccccgtctctactaaaaatacaaaaattagctgggcgtggtggcaggtgcctgtaatcccagttactcaggaggctgaggcaggagaatcgcttgaacccaggaggcagaggttgcattgagccgagatcgcaccattgcactccagcctgggggacaagagcgagacttcgtcacacacacacacacacacacacacacacacacacacacacacaaaactggacacaactggccaggcgcggtggctcacgcctgtaatcccagcactttgggaggccgaggtggacggatcacgaggtcaggagatcgagatcatcctggctaacacagtgaaacccgttctctactaaaaatacaaaaattagccaggcatcgtggtgggcacctgtagtcctagctactcaggaggctgaggcagcagaatggtgtgaacccaggaggcagagcttgcagtgagctgatattgcaccactgcactccagcctgggcgacagagcgagactctgcctcaaaaaaaaaaaaaaaaaacctggacacaacttactgagatatgaaactatatggatatttgcggagatgtccctaatataccctaaagccagagacaactgataaagactctatacaaatcaaataggcagttatgcagttacaaaactcttctctatacacaaggtctcccaaagtccctaacaggtacccaactagtagaaacattcatacaaacccagggaaggaacacagaattggtaaagtaatggctgatatgcaacaacactgtacagccacaaagtatgggaagatgctcaagcttggggggcggggggtacaaataggtaagaaatttggattggcatgaaagagatatctgacaatgggagtgaagtgggaagggaggctgggacacatctttggagccaattgcttttctggtaggtctttgtaatgtgagatgagggatggggcacacctaccaaagaggctgagcccctccttcagtccactggccactttgtacactgaggggtgagactcactcttaaaaatctgtagaacactgtcgaggagaaatggaggagtttggggtaacttggacttttgaagggaataagaattgaggactgataaatggaatggggacaggggatatcctcctgagatcacgtcttttttttttttttttttttgagatggagtctcgctctgtcgcccaggctggagtgcagtggtgcaatttcagctcactgcaacctctgcctcctggattcaagcaatcctgcctcagcctcctgagtggctgggattacaggcgcacaacacacccagctaatttttatatttttagtagagacggggttttaccatattggtcaggtctcaaactcctgacctcaggcgatccacccgccttggcctcccaaagcgcggggattacaggcatgagccaccgcgcccagccgagatcatatcttgatgtaaggtttgtcccttacttttctttgcctcagtttctccctatagaaaagaaagctagtatctttatgcttttcttcctctctttccctcaaaaccccccttccctttccttcaaggagagagatcttaatagccccaggattagggaaactagagcctcattaggattattggggcattaaacttaatccttctccctccccagagacagcagcatgcctccacctctttacctgtaagtgtcttgatctatgttcaccagatgagtcctgaggacagaaaacaaaaaagcaggaagcagtctgagttcgttccacaactccacttcctttgtccccctctctgaatattgtcccagtcttcttcccaaagtctcattagcccttagattctcccgggtgtcctagagcacttgacccactgggtcacagccacatccacaccccacccccactttacttttcaggcctcccaatcccacattactttggttggggttggggtgaatcacctacaacataaatttcttaaagcccaggatggggacgctgacattatagtcttccagttcaaccccgattcttcttcgacccaggaacttcagcagccctccaagtgctcgaacctgggaggggatcagcagtggaatcggggtaaatcttaaatctcctgggggctgcagagcaccagggaaagttactattttccagggctaggccagtacctcccagaattcagccctagcacttgtgccgcctcccagcccttatcccccaggaccaatctcactgtgaggaggcagtcaaagggaataatggaagagaggaagaggattttctcagtggcagtcatggcgtctgggatgaaggagtagtttccagaaaggaggcgttgtttgcttatctccagacctatttgagggaggcaagcaaagggaacggtcttgtagctcaattttttcaccccattttaagaatgagacaatagaagcaagagagattatttgacttgcccaagctcacacaggcagttaatggaaagctagagcaagaaccaaattttcagactcttagtctaattctctttttattctacatataatataaagatacttgtctgaaagcacagcctgagaaagataaatggctgaggaaagtagacatctgtctggaattgaggattttggtcaaaataatggtattaatagaactagtaacactaatgccttaatatctaattaggatagtacactcctgttcttattgtaaacctaggaaagttatagaagtgccttatggatcataataagggtcactgaggcagtgccttttggtttggtgataaaaggctttaacttaatggggagaattccaacaataaaaccctgtccaaaaagtgtcaccactcctcaggggaggccctcatccctagacatgacttaagcagaggcttcccaataagctgcaggttattaaagggtagggagcaggagagatcttggggggacaggtcatagggcatgaggagcacaaaggtttaggatgacataaggcagaggggagatctgtgatgatgaaggtagagttgggggaaagaatgggacaccggaacagggagttaggctaagcaaaaggaaggagataccaaaatccacacttggcaaaaatatgatttcaggtcttttaggctctctgtgctcctgggaggctgtgggggaggaaagaaaaggctatcattctttacatctcagtccttctacctctgtctgacactccctctcacccaattctagccccctggaatattccatatattagtccttccccattttccctctatcctttaccaagtccttaccaagctttcccagaaatcgagtcatattctcatcctgtttggcactcgtaacaacagactggggattgatctcatccagaacttggaaggagaacagagatcaaatgagttaaaggatctttgtctttgactaagagaaaacccatagccctcctcttcctacccctctccttctcaaaaacatttcctccctaggagtagggagtgctctgcacagtgggaacacaggtagaagttgagatttagaaaagtagttaagagtggtgggatggtgagagggaagtgggatgttctggatgttgtcactaggctgtaaacccctggagaacagacatgactgatttgcccagggctgaatctgaagcacctgaaacattgtaaatacgtcatatatatttgtggccaggcacagtggctcatgcctataatccctgccctttgggaggccaaggcaggcagatcactggaggccaggagctcaagacaagcctagccaacgtggtgaaaccctgcctctactaaaaatataaaaattagccaggcgtgatggcagattcttgtaatcccagctactcgggagactgaggcaggagaattgcttgaatccgggagacggaggttgcagtgagccaagatggcaccactacacttccagcctgagtgacggagcaagacactgtctcaaaaaagaacaaccaaacaaaccaaaaaacaacctcacaaatatttgttaaataatgaaatgaattcataaaaacaaaagagggagcctctgtgaagcaactgtaaaatatattgagtcagtgctatagtttggatgtgatttgtccctgccaaatatcgtgttgaaatttaatccccagtgtgatagtgttgtgaggtagggcctagcaggaggtgtgtgggtgatgggagtggatcgctcatgaacagattaatgcccttcctggagtgtgttggtgggtatgagtgagaggttctcactctattagttcctgagagagctggttgtcaaaaagagcctggcatctccctcccccttgcttcttctctgccatgtgacctctacacaccctgccttcccttcttccatgagttgaagcagtctgaggctctcaccagtgaagatgcccaattttgagctttccaaccatccagaaccataagccaaataaaacttttttttttttttaacaaattactcagagtcaggtatttccttacagcaacacaaaatatgctagacagtgaggtgagttaatgtaagtaaaacatggctgggcgtggtgactcacacctgtagtcccagcactttaggaggccaaggtgggcggatcacaaggtcaggagtttgagaccaccctggccaacatggtgaaacaccatctgtgctaaaaacacacacaaaaaactagctgggtgtggtggcacacgcctgtagtcccagctactcgggaggttgagtcaggagaattgcttgaacccaggaggtggaggctgcagtgagccaagattgcgccactgcacttgagcctgggtaacagagcaagactctgtctagaaaaaaaaaatatgtgtgtgtgtgtgtgtgtgtgtgtgtgtgtgtgtgtgtgtgtaacacatctgcaatcccagagagcagaggaattcatggttccatccccacctctctggagaagcttgaggctctcgtggtctggggcatctggcatgaagtggatagtggagtcactagtatcatagtaggcaatgcccaagtatcctgaattccacagcacacacagatggatctgtccagcaaggaagaaaggaaatcactattagaatcactcataagtgtagggtttaccatgtcttatataatttaatcattttctcaaatctctgagataggcatcatcacccccatttagtgaatgtgaaacagccactcaggaggtaagagacttgcccagctcttcccaaccctgttttttttttctttctttctttgagacggagtcttgctctgtcgcccaggctgaagtgcagtggagcaatctcagctcattgcaacctccgcctcccgagttacagtgattctcctgcctcagccttcccagtagctgggataacaggcacgtgccaccacgctcggctaatttttatatttttagtagagacggggtttcgccatgttgcccaggctggtctccaactcctgagctcaggtgatccgcccgcctcagtctcccaaagtgctaagattacaggtgtgagccaccgcgcccggctcccaaccctcttttattctaacttcccatcaactctccattcaagtttctactcccctcagagacctcggccagctcctcctcctcctcgacttcctcctcctcggcctccctggggcccggcactggggccgggctggggaagccggaggaggccgccccaggtctcggtccctgcggtgtcctccttgggttcgctcctaaggaggccatgagcttggaggctctgcggatgcaaaaagtgagggcggttcggaagcaacgattcacagaggaggccggggtagggtggcgcgcagaatgcaaagcactaagtacttctgctacagggctgcggggcagggctgaggggcgtggagagctgtggacacaggaggtgaattctcgggtatttaactaaagtacagattgtgggaaactccacgcgccccaccctcattcctgtcacgcggaggttaccctttggaaggaaggggtctgagggccctgtggggcgagtcgtgcacgtcttatgtctctgcctctgccaaccacgcgccaggaccccagcctcacgcgcttatcttcctcctcccccagctgccgccatcgcagcgttttcccgccttttcagtaacctgagtcgctacaggtgggagaacgccccgctgaccgaccgccacgagcctgcaaaaggagcgcgccggcgcgtgagcgaggtgcgcgcgcacgcgccccgccctcctagccgctgttgattggagaggcccggatccagcctagagatccgacagggcgaggaggagaagcggactgccgtagctgaagagtctggacgctgattggcctatttgccttcggggcgggtccagaacgttcaaacttcccgccctctgccgttgcttagcagccgggcctctagcactcactgtttctgggatttgattggcgcagtgggaagcccgcgagaaggtcggaccagggtccgtagtcccagtccctggaaggggtttgggaccgttgcgggggttttgagggggaggccaaacttaaagagccagaggcgcttattttttttcctgcaacaactcttaagttaatatttgtaccctctgagttaatatttatacagagcttagaacagtgcctggcaaacaaagtaagacctaaatgagcggtgtttcaaataaataagcggaaacaagcaggacttctgtctcagccctaccgtgcctgtttcctgggtacagggtatgaccacccccataatggcacgacagggcctaatttattatttaaacccttcaagcagaggtggaagcattcgaattacatcaaattctggcagagagaagtagttctgatcagaacactcacacccctactgggacatgcccataccccttcgcacttctacacacccctgaagacagagaggtatctatcattcatgcattcggcaactatttagtgcctattttgggccaggggttggactcaaagcggtgaacataatgaagtcactgctccataaagcttatttgtgcgtctgtgtgtgtgtgtgtgtgtgtgtgtgtgtgtgtgtgtgtgtgtgttgcgggggtggggttatgagggagaaagaaaaaaaatatatatatatatatatataatccctttaaatgcaccatcctccccagctttgttcctagtaccctgagatggggagattcctccccagccccccaacccaagaagttaggaaagatggtgggggtgagatgacctagctgtgctaaccagtaattggaaaatcccctccagcaagaaaggtgggggaacagagttaagggctgggttaatggttacccctggcaaatctgttgagcaatggagctatagaaacttggaggaggttggtgacagctctggggagtgtcagggagggacccaccttccaatctggggtgtgaagagattagggactagtttaccaagcccaggaaggggagggagtggaaagagaagcccagagagggaaagaggagctactgagataggagaaatgcagggacagggaggtgagatggagggaaacctctgttgcaggatttgggggtacagccctggctctgctggatggttccaggagagggcagcgttgcctgtcacctggtaaattaaggcacgataccctgtgggtagtcatgccagccagccaaagtcaatattgatatcaaggcagctgtagctataaagctgtaggagagaaaagagaggccgggagaggctgccaaacctgtttgatcttcaagctggccccatttacctaaggcttctcttggacacagaccagttggaacaggagaggaccctgagaagtagagttgttttgatcccctcccctcaatgggaaggggtcctgtgtgcagattttgagggtcaccatgagggaattcacacccacacagaggcatggaatcatacccttacaggatgttacagttcaagggaacgaacaccaaagatagcctttctgtcgggaggagagaaaaaggccctcccacaagcaggagaaaacccacagaagaggaagcacaagaggaaaccaccaactgctggtttccagcagcacatcacgtcactccaccccactcctcccccaagtctctccctttctttaagtttcaagctctgttttagttctgtgttcttgcactccaccatggttttctggaactgtaggtcttttgttggacagagggtgatgaggaggatagagaagggatggttggacaggagagaaattcaggatatggaggctggaattctgggtttattttttcagcaggtcataaaggtttaatagaaatcaaggttactggagagagagctgctcctcctatgtcctccctgcttatttatttaggtgtccccaaggactctactcccactattctgtctgatctttctttatccccatgacaggaccagctaacaacacccctaccccaccccctatacacatacttcaggatcgggccatgataatcccacccctctgccccatctccaaggcaacctgtcagtgagacgaggacaaagggcacaggaaggggccccaataggaaacataagtggaagcacaaagctgaccaagctacaggaacagacccctccctgcaacaaagccccttgcctcggctttatgtttccttcgcaaaagacttcgtcatctcccttcccatccctaactctactttctttttcttttcttcttcttctttttttttttttttttgagatggagtttcgctcttattgcccaggctggagtgcaatggcaccatctcagctcactgcaaccttcacctcccgggttcaattgattctcctgcctcagcctcccaagtagctgggattacaggtgcccaccaccccgcctggcaaatttttgtatttttagtagagacagggtttcaccatgttggccagtctggtcttgactccctgacctcaggtgatccaccccccttggcctcctaaagtgttgggattacaggcgtgaaccacctcacccggcccctaactctatttcctatgcccaatcccaagtgtaggccacaaggactgcaagtcctagtgctgagctgggcccggagacagtagactgcggggggcacaggacctactgagacaccagtctgggcagctcagggagtgctggcgtcaccccttccctaatcccaggctgcatggctaacggttcctatctgcagtcccagccttccacttccgagttcttctctcagaccacagtcccagcaacccagaatttggattggagtctggaagaaatgcagaatgattaaacgaccacctttccatttgaagtccccatccctgaatcttcacgggtgtgcccaagctgttagtgtcaagttttttatatgagggtcagtcgggttgtactcagattaatgaagcagggaaactgaggcagaaaagagtcctgtgttcaggagaggtcggagaaacaaggaggttttcaggactcctccttaacacccccatccccatcctgtgggagatccgaggattccccttccggactcactccctacatcgtcgagtcccgcccccctccagtcccctccccaggttcagggcggggccggtcggtgagtcagcggctctctgatccagcccgggagaggaccgagctggaggagctgggtgtggggtgcgttgggctggtggggaggcctagtttgggtgcaagtaggtctgattgagcttgtgttgtgctgaagggacagccctgggtctaggggagagagtccctgagtgtgagacccgccttccccggtcccagcccctcccagttcccccagggacggccacttcctggtccccgacgcaaccatggctgaagaacaaccgcaggtcgaattgttcgtgaaggtaagaacacttctctcctcagccacccaaattcctggaagccaactctcacctttcccccggtccagccttaactccccaatcccttccctccttgactcccacccccaatcccacgtgcactctttggttgaggggtggttttgagaggggaagacattaacttgttagcaagtaatgagaattctaggatcaaccctgaaaagtttgtaaaagtgcaagtttctagcagactaaaggaagggaagtggagaaaaaggagaattcccaaaagtgagactggggtggggttagagggcgagctggtgaagggacagtgggggcccagcagggtttagaagggacagaggggaacctcagttaggacatgtgtccctacaagatctgagggtgagtagtgcagtaggagaggtgtgtgtgtgtgtgtgtgtgtgtgtgtgtgtgtgtgtgtgtggatggagacgcttcagggaagacggtgtgttgagggaggcctgagagtgagagcaagtaaattgggaagctttggaggggcggaacaaaacaggagactgggatcggagtttgaaaagcagagctggagaggtgatcgggtggcattgaatatccccaggactggggaaagggacagaaggggaggtggcaagaagacgtgagtttaacgtagctaccacaaggatgggtgggagagagatcagacggaggagaagagctcggttagggcattttgggatttgggggttggagaagtagaagacttgccccaactctctcctctctctgcgggtgtgggtaaggagagatggtcctatggcatttgggtagcaaaactgcaggcagcaggcttctcggtgtcacccagcccccctctgattgcagcggccgctcccctccctaccgctgctgcattcatttcccagtcttgggacctcctggctgtgcccctccctcccttccttaacagtgtcctcttctccccgctccgtttgtgtctctccgttggcacgcacgtctccccactctccactttcctgccgcctttctttccccttccccccttttgtttctctcatctttgtgtgtctctgcctgtgtctccctctcccttctgcttgggtttctcgggcagccattccctctccctgggcccagggaagtcggagcctgcttgggtccgcccccttaggtgtggtccccacctcactctcacattcgcctccggggctatttttactcgtgggtgaggctgtgccgcagagattccggccctgtgtcctgtgagaggatggttattgcagtcagaggacttgtgctgggagaccctggcaacaggttaggggtagccttagctgcccaggcctcatcctcactgtcccttcccccacatccttgacaggaaggaagccggagacagagagatgaatcaccctcagcttagggggaggtgtcccttgggccaatgaggtcaccacttgctaattagagggcagcccctctctgtagggccctccacatctctagcgcgaggcccagggccccttgactagactccccacccaaagacaccttggattggaggtgtagagaaccaaaactctggctcccaaaccccacccacctctcctgtcttcagactctactcccttcaggaacccagaaatccaggcttctagcctacaactctggcctcactgaagttccacacccttccctctctaggattcagatcctcccaagttctccaggacctcctccctctacctacctcccacctgtcctcagtgtctggggaaccagaagcctgcctttgcaaaacagtttcccattgatctgccttaggtttgacccaggcccaagggcaaagagcccatagtgaggggacagtgtatgtgtcatgactaggcagaaaacagctggtctgggagtgggaatgcagggactggcctagggatgggtggggtgcatcaggcataaccttgggttggggttacttttcaggctggcagtgatggggccaagattgggaactgcccattctcccagagactgttcatggtactgtggctcaagggagtcaccttcaatgttaccaccgttgacaccaaaaggtaggcctgcttatgttccttgaaacacccctggtgtacacatgtgtgcaaacacacacccacccgagtccttctgtcatgaacatttttgccctccccctggagtccctttcttatcccacgtcctccattccccctttctggttcttcctgacccccatttccagtcctgattcctgatcctttctccaggcggaccgagacagtgcagaagctgtgcccaggggggcagctcccattcctgctgtatggcactgaagtgcacacagacaccaacaagattgaggaatttctggaggcagtgctgtgccctcccaggtataggggcactcagaaagtggagaggtggagcagggagattctgggaaacagacagtttgcagaaatggaaaacagagatggtggtggggctggggcaggagagctagctgaggttcctcccaggaagacatcttacctcatttttcccattggctttcaggtaccccaagctggcagctctgaaccctgagtccaacacagctgggctggacatatttgccaaattttctgcctacatcaagaattcaaacccagcactcaatgacagtgagtcttgtgggtcagaggcctgggtcctgggaggaatagagaggacccagcgggtaggagacattaggggcacctggacgttcagatatcagggagatgaagcagatgttcgtaaatttcccccagcttcccatttttgctttacctctatatttccctgcattttcattggccaagacttttaagcttttctcatttgttccctagcctcttctgccccactgaggacgttagttggctgctggcctgttttctggcagaatagggtcatgcttaagaacagtcatcactctagatccagactacctgagtacaaatccaactagccgtataattttgagcaatcatttcacctctctgtaagtccatttccagatccacaaaattaggatgacaatacctatttcatgggttgatataaatttttttttttctttttttttgagatggagtctcgttctgtcgcccaggctggagtgcagtggtgcaatcagctcactgcaacctctgcctgccgggttcaagcaattctcctgcctcagcctcctgagtagctgggattacagacgtgcatcaccacgcccagctaatttttgtatttttagtagagacagggtttcaccatgttggccaggctggtcttgaactcccgacctcaggtgatccacctgcctcggcctccaaaagtgctgggattacaggagtgagccactgcacccggcgatataaatgagtttgtaaaatgtaaagtgttcactttgggaggccgaggctagcgcaccacctgaggttaggagttggagaccagcctggccaacatgactggtctctactgaaaaaaatacaaaaattagccagttgtggtggcaggcacctgtaatcccagctactcaggaggctgaggcaggagaatcatttgaatctaggaggcagaggttgcagtgagccgggatcatgccactgcactccagcctgggcaacggagcaagactccgtctaacataaaataaaatgtaaagtgcttagaataacacatagaaaagtaactacatgagtgttagctattattattttggactcaccattagtatccacccccaacgggccttttcggactatgtcaatcttttcctgaagttctaatcagttccctctcttgcacagatctggagaagggactcctgaaagccctgaaggttttagacaattacttaacatcccccctcccagaagaagtggatgaaaccagtgctgaagatgaaggtgtctctcagaggaagtttttggatggcaacgagctcaccctggctgactgcaacctgttgccaaagttacacatagtacaggtgtgtggttattgcgggaggagaggatgaccactggagtggccctttaaggagctcccacatgggcttcccctgacaaccactctaaagacgatttctttcttagggtggttttcataaattgctaccaatggcagaccccaccccagtcctttgcagcagtcattgctaacaagaccactgcttgagataattatattccatgatgtaagtcatgggtgcaaacagactagcaaagaggaatacatcccagtattacttttgaagaatgctcttcctgtctcggtatcactgccaaattcccagattagacagagcaggcttttcctaaagtcaaagctttaactttctttataacttcagtcttcacttcctcttgtggaagatcaaaactgctggttcccatgtttttgtcatagtctcaaagctatggtttagtttgtgcaacatgggcctgacatcagtctgccacacaactatgtagtgaacatctgtgtactaagcattgaaagatacacaagtgtatggtgactgggccttgctctcaaagggttgaaatctgagacaataaaatattcacatgaaagttaagaatatatgatgaaaagtcagatgggccgggcgtggtggctcacgcctataatcccaacactttgggcggccaaggctggtggaccacctgaggttaggagttcgagaccagcctggccaacatggtgaaaccccatctctactaaaattacaaaaattagccgcacatggtggtgggcacctgtaatcacagctatttgggaggctgaggcaggagaatcacttgaacccgggaggcggaggttgcagtgagccaagatcgcgccattgcactccagcctgggtgacagcaagactccatctcaaaaaaaaaaaagtctgatgaaaaatatagagacaaaagtcacctgtgtcagtgcctgaagtggtatagggggaaaaagtcactgtggaaattcaagaggagaattttataagtaaattatatctcaagttttaaaaactcaggaaaaatggctggttattaaaagccaggatttcagtaagtgagaaggaaggctaacgacagtacaagacagtgaggagttgagctggttttatcatgtcggcctggggagaagggaaagccaaggtggcttccctgggtctaacatgttggtccctctcctctccccatcctcaggtggtgtgtaagaagtaccggggattcaccatccccgaggccttccggggagtgcatcggtacttgagcaatgcctacgcccgggaagaattcgcttccacctgtccagatgatgaggagatcgagctcgcctatgagcaagtggcaaaggccctcaaataagcccctcctgggactccctcaaccccctccattttctccacaaaggccctggtggtttccacattgctacccaatggacacactccaaaatggccagtgggcagggaatcctggagcacttgttccgggatggtgtggtggaagaggggatgagggaaagaaatggggggcctgggtcagatttttattgtggggtgggatgagtaggacaacatatttcagtaataaaatacagaataaaaatcaagtgtttttacgcaatgggggtttaaagtgtgggcgacatggaatgaggggtgggtcagtgatcttgagctcagggcagaagccaggaattaagaagggaaatgtttgtggtggggctgctatgtttcgtgccggtccgccggtccgccgttgcgctgttctgaggtctacgaagcgtttgcagccccgtcgccagggccggccagatctgggtgggcctgggcagcgctcgctgggcggtgccgatttctggcaaggggggcgcagtctggatgtaatgggcgcggcttagcagggcggaatgggcgtggcccgaagaagccccgccccgtcccgcttagacaatgccccggagccgccagaccgtcgcgcccctgccccatcgtagtatatgagctcgcctacacaaggacccccgctaaaagccagagctcccagtccccgaggcttgaagacggggactcccttctccaccaactctgtcctcggggggtggggccccagccgagatcacagcgcgacaggagtgggggtggccgctggaggtgagtcttgcgtggggggccctgaaccgtgtgggggccggagtttgggggtgccgggcccatgcctgcaccagacagagagtatggggagccggtatttgggcgcggagctaggcggggtggactttgggacatagacggggaaccgggtcctggagccgggagtagtgccagcgccccggaaccacgccccctgttaccccgcccctcgcatttcgttttagacctctcccagtccttcgggactcggtctggtttatactaggtcgtgctaggggcagcgtgaccagccagggcggagagaggatgcttaactccttaggctcgaactcctcccttcctacccacctctctcccttctcgttcgggtattcaggacttccattccccagcccctgcctctccagctttctccttctgtcccataacccctgcgggtcccgggctggacttccagtccctgcggtagcgagcagctgagggttaagggggcggggctgctgcatttttggggagtgagcgcatcctagtggctgccaagaggggcgcccgacagggacctcacaagcccccaagcaggggcaacaggtgttttggagattagagaccctagccttgttcctcaggctcctcttaaagaatctgacccctgagggtgctgggtagagtgaggtcgacaggagcggaaggtctggagtgggtggggcggagtgggagggacgcctagagatggcaggaggaagacctgggcgctcttaaccacccccaacgcccttgtctgcatgtctttttctctgtctcctccttttctgtttcttctcccagacaggtgaagaaacaagaaaactaagaaatccgagcggttggagggggagtctgtgtggatgggatggggacgccgggggaggggctgggccgctgctcccatgccctgatccggggagtcccagagagcctggcgtcgggggaaggtgcgggggctggccttcccgctctggatctggccaaagctcaaagggagcacggggtgctgggaggtaaactgaggcaacgactggggctacagctgctagaactgccacctgaggagtcattgccgctgggaccgctgcttggcgacacggccgtgatccaaggggacacggccctaatcacgcggccctggagccccgctcgtaggccagaggtgagcgccgtggcgcgggtgtggtatggggaaaggcagaaggaactggatgtcggggctttggggaagaattgaggatgggggtgtcacagctccgtgccctcttctcctatcctaaggtcgatggagtccgcaaagccctgcaagacctggggctccgaattgtggaaataggagacgagaacgcgacgctggatggcactgacgttctcttcaccggtgaggctggggggaggcataggtcttggcacagggaagtagagtttgggagactcggccgtctggagccttgtttctaactcactcccgccctcaaacctccgcggcctcccggactcaggccgggagtttttcgtaggcctctccaaatggaccaatcaccgaggagctgagatcgtggcggacacgttccgggtgcggagcgggaccagcctagggagggagggggtgcaggtgggggtcggaagggcctgggcgcccgctgaggaaatgagaggcagagagcagcctatgtttgaagataccccatcacccctcccgcgcccctgaatacctcccttcgctctccctaggacttcgccgtctccactgtgccagtctcgggtccctcccacctgcgcggtctctgcggcatggggggacctcgcactgttgtggcaggcagcagcgacgctgcccaaaaggctgtccgggtgaggagggggcggggccaacgaaagtgggcgcagttctgggcccgggaggccgggagctgggaggcttaggaaattagccctaacccctgccctcaatgggctgtccatcttacatgaaagaacacaggagaaaataagaagttacaacagcaggactgggaacaggggtgattaatttgctcttccggagtttcaggaaaccccaaaggtggcacctaaactgtgactctaaggatgggtaggacagataggaggggctggggaaggtagggggttgaaaataactgcatgtgattccaaggtggaaattagcaaaggtaactaaagtacttagtgtctgacatatcgtaagctctatgtgcttgctgtcattattttccacaaatgtcagtccgtccccagcccttagtggtggttgagcaggcagacacagctgtggagaggttctgagactcgaacacttcctctttcctctaggcaatggcagtgctgacagatcacccatatgcctccctgaccctcccagatgacgcagctgctgactgtctctttcttcgtcctgggttgcctggtgtgccccctttcctcctgcaccgtggaggtggggatctgcccaacagccaggaggtgagagagggcaggaactccaacaccaagcaccatcagagaaaagagtttcaggctttcctagtgggaggaaggaagggtaccttctctagaagcctgggtggggccactctgagctggctggaagagtggcctggctcagcctgaggtctcactcccctctccccactccatgtcttccctgtgcaggcactgcagaagctctctgatgtcaccctggtacctgtgtcctgctcagaactggagaaggctggcgccgggctcagctccctctgcttggtgctcagcacacgcccccacagctgagggcctggccttggggtactgctggccaggggtaggatagtataggaagtagaaggggaaggagggttagatagagaatgctgaataggcagtagttgggagagagcctcaatattgggggaggggagagtgtagggaaaaggatccactgggtgaatcctccctctcagaaccaataaaatagaattgaccttttagactgggctgtgactggtgtcttactggggcaaagggatagggcagggctgaaacctgagtttggggtcagtgcagggaagaaggcctcttattcaaaaatcttgttaggtacttatcaactcattgcccaaccatgtcataggtacttgagcacaagatgaacaagacagaatttctatcatgggaagtgtgtccagggcagagaaaagagtgtatgggtggattgctcactgaatttatctaaatgttagatgattcagagactggtagattaccagtccacccctatttgataaagaaaaagaaatgacacttccagggacattcattttcattcattcatttaatgaggcttagcaatgatatcaaaagggtcagtctcctgacgttggggagctcacagtacatgcaaatttcttacaaattgaaatacaggttgtcatggaacaatttacagaaggctgtttctatgagggaaataaagggggtgtgccctagggcatcaaagtatatgcaaggggtggccaaggagggtcaccttcccagaaaaggccatacttgaactaaggataaataagaattagccaggcagatagtgtgaaggagggaaaggggtaatacaggaagaaggaattgcactgggcaaagacattttggggctagggagaattctctaaggctggcattttctaagatgtgcatgtggaatgacacaggtaagcctggagagtggacaaagtgctgtagtaccttgtatccaaagccaaggcacgtgggcacagagctgaagctaaggagagtacttcagttctgtaataagggctgtcaggagcagttatctcttgagtaggatctctctgacttcagggaggaaagcaagggtaggaggatgaggtggggctatgggtaatccaggaaggaagtgagcagagtacattcacgtggcagcgctgggcatggaatacagtgtgggtttgacagtgatgttaagatagaaagactggacttcatggctcattgtgtgggagtaagagagaaaggaggtctgcgtgactcccagtttctgggttgggcaactgggttgttaaagagaatacagaggagaattaagtgagcagcttcagagatgacaatgagttgggtttgacattcagagtgcgaaatgcctgaggtcagtcaggcagaatgtctaagtggaagtttgttaatcccaaatctgagatctgagccagagagagttctgagtgtcatttgcagaggagggggctgaggactgactgttgatgagagtgtcccagaagaagagaaagggacaaacctagaatggtgggaaatactgtagggatatggagcaaggaagaggagtccaaaaagaaaacaccagcaacaaagaaaaacagcttaaagaatcaggccgggcgcggtggctcacacctgtaatcctagcactttgggaggccggggcgggtggatcacgaggttagcagatcaagaccatcctggctaacacagtgaaaccccgtctctactaaaaatacaaaaaattagctgggcgtggtggcgggcgcctgtagtcccagctactcaggagcctgaggcaggagaatggtgtgaacccggcaggcggagcttgcagtgagggagatggtgtcactgcactccagcctgggcaacagagcgagactccgtctcaaaaaaaaaaaaaaaaggagctagggcttgattgggtatagagaggacactggtggtgagggagacatggaggttataggagagatgggagtaagtttagaagtaagaccagtggcagagacagcctggaacccaggtctcccaactcccagtctagcacttatttctataccatggtgccttcctcttccaggtgaggaaccaaggaggggagagggattatggggagctgggatcccctagcttgggaggtttggagtaagggcttcccttcaaactacaactgcatagatggtggaggcatcagcagggtccgctgtggacagccggcggggcctgctgagggctagatggtccagatccgcatagagcaggctctggaggaggaaggggaggaagacaagatggtctccacagtcttccttggggttcaggcctttttttttttggtccattttcctcagagattctggctatccccttcccatccccatgcccttaccggttcctggtccaggtcccctggaatcttgggctcttcctcctttactggcctctggggctcggttttcacaagtggagctatgtgggggggacagagctgaaggatggagagaaggtgaccaacgtgtctgctcccagcaagggctcagactcaggaattgaggggtggggagtgggcatgtaggagaaagaaaatggggtggaattagtctcaccaaatctagggagtggtcgaatcggttgcgggggcaggcgcctgtaagggacatatgagtctttgagaaccaccagtcttgtctcactggttctcctgggactcgccacgccaaggacagcccagcaacttgaaggctcagaccggaaacaacttagactctaccccaccgacagtccagcccaggctctaactctgctgcacttccagctcatctgctctggtggggctctactcaccagccagcggcctcgctcccacctttgacctctcccattcttcgccaagccaggaccagagctctaggtctagctctttcttttgcgaaggttctggtcctgccccttccacctctggtcactccccatttaacgaggccgggtccctcctgctcacctgtgcagccaccagaccaggcccaaagctcccagtccgagcaccaacccagcgcccagcagcgggatcaggagctggggatacacggaccctgggggaaaggcgtggcggggagggatgctgaggtcaggggtttgacgagggacagccagcagtcccgctcaagaacccccagccaaggccctcttccctcctccgggtatgtgtcggagttaagtacccttgtgcgcacaggcctgcacctaccatgggtaggcccgggggccttgcaataggtcctgtcccccagcacgtgaagcactgtacggctctcgtcctcgtggcggcccttgcagaaaaaagtgcccgagtctcccgcgctcaagaggagctccagccgccggataccagagtccagggagcgtaggcggccgacgaaaggctggaggggaggcacggtgggggtcccgctcgaagaggcccacaggatcggtcggcgtcctttggacaggcccttgcaggccgggaagctgggtgcccagacccagcggatgggatgagagactcctccgcaggagagattcacccggtccccagggcggccgtccagagaagctaggagaggccggaggctgtggttagggcacgtccacagggcaagacgaccctccatcccgtctcctctttctcttctctgttctgcactccagccatcctggatcttcccacacacaacccaccctactaggcggcccttatcttgcttcagcccctctgcgtctatcacaactctcccagggatcgcttacccccagggttcccttgggccctcgagagcagcagcggtagcagctgcagaaacacagccatggttaggatgtggtgaggagaagctgcgagcgaatcagcggcgtggggccggttggggggggaccggagggaagttaggcgtggggagaacggaggggctggggggctccgataagagagggggcggggccaccagctgcccagatccctttgggaatcctcgcaggcaaactcggagtcttcaaatggttctcacttaaaatgtgtgctcgggccatttacacaaatgctttggcctgcttaacttttcaggtgcgcctgtaatcccagctacttaggaggctgaggagggaggatcgcttgagctcaggaggtcgaggttgcagtgaactgtgatcaggccattgcactccagcctgggcgacagagccagccagaccctgtctcaaaaacaacaacaacaaaaactcctgttttgtaggggattgtgataacgaaataaagtaatacatgtaaactgcttagaatacataggatcactatgtaagtgcttgccattattattactatttctattctttttttttttttttttttttgagtcagagtcttgctctgtggccaggctggagtgcaatctcgactcactgcagcctccggctcctggattcaagtgagtctcctgtctcagcctcctgagtagctggaactacaggtgcatgccaccacacctaatttttgtattttcagtagagatggggtttcaccatgttggccaggatggtctcgatctcttgaccttgtgatccacccacctcggcctcccaaagtgctgagattacaggtgtgagccaccacacccggcctactatttctattcttattttagcttctacctcacctctctgtgcccatgctgttcctcctggcttggtaccctgcccaagttggcaggttttgactggggaggtgctttggagcaggtgcacacagccacacctaggacaattgctgctgctggactggagcaacaaggccacaccaagcgcaagtggagcacgggtgacatcctgagaaccttcatgggagcctgaggcagccctacttagcagacctgtggtggctctcctggatgagtagccccagcccctgcctctgctgctgtggcatcacagaagccatcagtgagtcacttattgctgagcaggtattggaaagaccgagtgggggctgaatggagattaatttgacccattcctcccccaatttccaccagcatgcccctatcaatgcccagcagggacccagggacccaaattcagcaattaatttgggccacatccttttgtccattttccaggaaccagcagaagctgccaccatggacactgtaaatcacagaggcctttgatgatgctcattcagaggactgagcagcaggactcttagctggggaccaggaagggcatcttggcctgaaaccaagaaccacaatggcattggccactagtggcacctgccttcccccatccctctctcccatccctactccccactcagtcctgctcagtgccttcccaccccttgtcttttctctggtcagctgcgtagtaagtgagaagggaggggctaccagaggcagggaagggaggagcctttgggtttataaattccaaaaaggccactcaactcctagagctggatccttgaaaatctactctatcagctgctgtggttgccaccattctcaggaccctcgccatgaaagcccttatgctgctcaccctgtctgttctgctctgctgggtctcaggtgagcacctgggggccccaaagacctggtttgcctggtcaggacctttacaccctgctctacccacttcccggccctacccaccactcgggatcccaacacccccagccccaactggctcagctctcctgtgccaccaagaccaggcttccctatgacagcctccttgctctatttctcaaaaagccaggtctccatccatcctccccacctccaagaaagacccatttctctcacctgccagggctctgggtcccctgttccccactccaaggtgtctcctccttggaaactctggtatccagttccccaaccagccccacttcaatatgcaactctccagagtctagcttacctgccttctcctctatctgctgtgctcagtaaggtgtcctctcgaagacctaggcatccagccccaggctccttttgtaacctaccctccccatctactccatcagggactcacatgttcagtctctcagccatggcctttcctagataccccctactcccctcctgggttgcatacctcctcccatacaggggatacaaactttctagatggttgcagtgacatctaagagcctccatggaaacagagcgttttcttgagccttctgaagaggggacaactgggccacttacctccagggtgaagtggatttcactgaggtacacttaccaggctcttccaccctcggaccctgcgtcaccaaatcttgcctgcccaaaccttgaattaactgaagcaggaaacttggggtgccaccttctgtatccaccctctccattttgataaggtgctaagatggaatctggtgatctgtctctcaggtatcattcctttctgctgaagagctactggggtgagaggattctattcaggtctggttcctcttgccacactcttgccagctccaggaggtgaagagtaaattgtaaattgctaaagctggccacagatggctttctcgccagcctcaagttccaaggcatttctgacagtgttgtaaccctcatgattttcatttttattatttctccttctttcaagtttccatctcctccttcaccatccacattctttccccatggtatcttcctcacattccatctatctccagccccatgtttttcttcatagttctgtccctcttgactcacctccaaacggggtggagtgacggaagatatgtagggcatgggcctttcacaaagcaacagctctacccttacctgccgcccactttccattttccctgcatcactcacctgctctgtgcttgctagaccaaacagccaaacaggttggagcacctacgggatgggctcttctccaccctccacccctgcccccagctcagcttatccccaggtaagtcagagaccccatcacctcagcctgacttgtgtcttcccagctgacattcgctgtcactcctgctacaaggtccctgtgctgggctgtgtggaccggcagtcctgccgcctggagccaggacagcaatgcctgacaacacatgcataccttggtaacatccccttccttagtggggtgaacagggaggtgggagcctctatgaccaggactgaggcccaaatgggtctaagactgagatggagaagcagaggattatagcaatgataatatttggccaaagatggttgtgtgccaggcaacatcctatgtctttgcatgcctttttttcaattaatgttcatgacaaccctgtgatgtgggtgctattattatactgagaaaacggcctcaaaaagagacagtaacacagccgggcatggtggctcatgcctgtaatcccagcactttgggaggccaaggtggttggatcacttgaggtcaggagttcaagaccagcctggccaacatggtgaaaccccatttctactaaatatacaaaaattagccaggcatggtagtgggcgcctgtaatcccagctactcgggaggctgaggcaggagaatcgcttgaacctgggaggcggaggttgcagtgagctgagatggcaccactgcactccagcctgggcgagagtgagactctgtcttggaaaaaacaaaaaaacaaaaaacagagacagtaacaggtccatggccagcaagtgatagaaccaggactgggggagtggtgggtaaggatgtgcagaaggaagatcagactaagaaaagagaaggggagggccagggacagagttgggaaggaaggaagcctaggtgggtggatggggtggggaggtggacacaggcatgccaggtgcccatcctggccgattccctgcccattcccacccctaggtaagatgtgggttttctccaatctgcgctgtggcacaccagaagagccctgtcaggaggccttcaaccaaaccaaccgtaagctgggtctgacatataacaccacctgctgcaacaaggacaactgcaacagcgcaggaccccggcccactccagccctgggccttgtcttccttacctccttggctggccttggcctctggctgctgcactgagactcattccattggctgcccctcctcccacctgccttggcctgagcctctctccctgtgtctctgtatcccctggctttacagaatcgtctctccctagctcccatttctttaattaaacactgttccgagtggtctcctcatccatccttcccacctcacacccttcactctcctttttctgggtcccttcccacttccttccaggacctccattggctcctagaagggctccccactttgcttcctatactctgctgtcccctacttgaggagggattgggatctgggcctgaaatggggcttctgtgttgtccccagtgaaggctcccacaaggacctgatgacctcactgtacagagctgactccccaaatccaggctcccatatgtaccccatcccccatactcacctctttccattttgagtaataaatgtctgagtctgataaaatgtacatttattataagaagacctaagggtcaggtcacctcccaggaaataatactctcaatctccctcccttacacaggaatccttcagggaggttccctgggaggctgggctggggaaaatggagaaacaggtttttcaggtcttcatcctcccttccagtgtctccaggtggcacacaacaactcatatcctaaatttaggccacacccctgatgtattgccaagaagaaggtgcggcctggcttgagggctctccagaaaggataggagaggtacatggagatggggcctgagaccctgtttcttcagtttctctcaggttagagtcaaaggcctcacctagcctagttagtaagtagggcatcaagcagtttttacctatcacagtttttacatttcttttctcaattcaaaatagtcctattgggagccaacttgcaaatgggaaataggggagcaaacccagactcatgctcacaaaaccctggcaaccccactcaatgaatctcattgctaaggaagattcaacccagcaacaggatccaggagccacagaaggcagataagccattgccctttggggtttagttggttaaggagtgcaccactgtaattaagcccgctgttgcttggtaacccccaaactagaacctggatgccccatattacgcttttagccctcccatcaaccaaagatagatgtaattttccagtcagctgtagagtggttcatagattttaatgactcacagaaggatgtttgtcttctcacattagatgttcagatgtcccttgttcccttgctcccttgttcccttctctactcctactccccctatccgctccacagtcctggcaagagacaggtcagggcggtagctgctgcagccaaaatgcctgcaggggccacatggcttgccacggcgctgttgcacaggtctcccaggtagcagtccctgtgggctggataagtcacgtctcccaccgactctgtctccacttgattgcaatgatgggctgcgacgcaggctggatgttggtgaatcaaggtcactggggctgagagagagaatgaaactggggtgttggactcctggcttcaggacttgccttctggggcagagcagatgtgatttcaaggagcccaaagggattttcagccccctcaaaaaacacctccctgaaaccaagtgatcaaagttaatgcattgaccttgtaaactcctgatgtgatgcagcaagaaggatgcaacatcacttctgcagtattcttgcttaaaatgcatgacctcaatctcatcatggcaaatatcagataaataaatatcgagggacattctataaaataatttttagtatttcaagtatctgtaattttttttttttttttgagacggagtttcactcttattgcccagctggagtgcaatggtgtgatctcggctcaccgcgacctccacctcttgggttcaagcaattctcctgcctcaggttcccgagtagctggtattacaggcgggcaccactacacccggctaattttgtatttttagtagagacgagatttctccacattgatcaggctggtcttgaactcccgacctcaggttatccacccgccttggcctcccaaagtgctgggattacaggcgtgagccactgcatccggcacgtaatttttgtttaatctaaaaatgattttatttaattttagagaaaagatcttgctctctcactcaggctggagtgtggtggtgcaatcatacctccctatagcctcaaactcctgggctcaagtaatcctcctgcctcagcctctcaggaaactgagattacaggtgtgtgccactatgcctggctaattttttaaaaacattttttgtagagatgggggtctcactttgctgcccaggctggtgtcaaactcctgacctcaggtgactcttcagccttggcctcccaaagtgctgggattacaagtgtgtgccaccaagcctagcctaaaaattattattattattatttttgagacagggtctcattttgttccccaggctggagtgtagtggcgtgatcatggctcattgtagcttcaatctcccaggctcaagcgatcctccctcttcagccccctgagtagctaggactacaagcatgtgccaccacacccaactaattttttaatctgtttgtttgtttgtttgtttgttttttgtagagacagggtctccctatgttgcccaggctggtctcaactcttgggctcaagtggtcctcccaccttggcctcctaaagtgctgggattacaggtgcgagtgactgcactggccctaaaagtaattttttaaactccaggtataaaataatttatcagggctcttcaaatgtgtcagggtcatgaaagacaaagaaaaacagaactggcacagatcagaggagactaagaagacatgagagctaaatgcaatgtaggatcttgctaaatcaaataaagtctgtagattagttagtagtattgtatcagttattttgtgattttgataattgtgctatggttatgtaagatgttagcattaggagaagttgagtatttctgcaacttttctgtcaatccaaaattatgttaaaataaaatattaaaaacatgtacacacacacacacacacacacacacacacacacacccctccctggtccttaactaatgccgaaaatttgaagtttggttttaactttggcctttcagggccagagctcttcatttgtgagctaatgggcctatgagattcttttaggagaataaggaggtggggaagtgggggcacaaggactgtgggcctctcaggggctccgtgccaggagccagaaggggtacagactgctctcctctaacagctgcaccatctgcccagagccagactgagcctggagggttctggaagccagaaggattgacatggggctggaggcagggaaaggctgctggaagagggagaaactgaggactcacggtttccaggtagcttgatctgttccaggcctggctggggtctgccctcgccacaggtggtcacggcctctttgcaagaactgctggggcttccaccacagttgtagcaccgcattcggtttcctggcaggagaaaagaggcgctggacctgggccctcggtggagccggctggcagaaggcctgtgtgagaagctagctggccgcctccttacccaaggcagcccctagcagggagctgagcaagatcccaacaaactggggtttcatcgcagtctgcccgtgtcaggaccgcctctacctcctgcccacccccctccccagcccggctctgcctgccttatatcccccgtgccttgagctttatagggctataaaaaaggaagaaagagtctcccccagcaggcaccaagggccccagtggggacagggaggggccccacagcatgctctcagcatcctctggagtcctcaaactcctttatcctcagcagcagtctgtggaccaacaagaacccctgaggatccctgataccctttcacagggtccttgagggtcctccttttgcaactatctgtgtaaggtcagattttcttcatatactggacttcaacgaaaacaacatatcccaacagactgaatgcagaagcagataggaaaacccaggcatctcccacgaagcctgacactagattcacaaaaatgtaaagcaatgctcagcttctcactgtgctgtggagaaataatagttatttttcacaaaactgtattttgttagcatgtaatactttattatttttattgtttaaataaatcaataaatacctactttaaattttctgttttaatttttaatgtagtaaatattgatataacctcataaagaaaagctcttcagagtcttaagtaactttgaaaagtgtaaagaggtcctgagatcaatatttttgaaaagagctgctctcctgggcacctgtgtctcccctatcttcactccctgttcctagtcttactcctcctggtacatgctggctctgattccccagatgggccttcctccttcccagtctcttcaaccccagccttccaggctgtatcaccacccccctaccccaaatcccatccatgccttcctttctagtgatttctccccagtgcaagcacatcagcaggccctccagccccacccgtggttatttctttcctccaaggtagtaaagctggcagggataattacagggtaggaatgttgaagcttggggggatcaaagggatctgaagctgggtggggtccgcccttacacagctgggctttgtgtgtgcatgtgggtgtgtgggtgggggtattgttgattctacactcaaacagatccacgccggggctgtttaggagggtgactttgagagacatgaaagcactgagggggaaagacagagaaaacaaagacagagagaagctgagagagccagggagcagcttgagacatggggagggagggggaggagtaggagggaaggcgacagacacaactcaggagcaggagaggaagctaagttacagagacaacatgctgagagagcagaggagaccctccaggcaagggcagactccttgcaggggcaggctgggggcccccgctgcctgctgggtcaggctggtgaatctggtcatggttccgccccccagattcactccctaggtgtgtttgtttactggttcctcactgtcttgctcaaatgctccaactctacaaatcccgggatctcggggtgcagatcacctctcccagattcctgagcctgtgtctggccatgggcacctccagcatcttcctctgcgtgctgttcctctgtggggcactgggtaagggtgggctggggaaccttcagtggtcagggggctgggggtggggacaagggcatgtggaggaacctgagggctggggaggagaggggtgtgggtgctggaagaggccaagaagagagctgggggagtgggggacttcagggagaccagccactgggaaggccagcctgatgaggtgggaaaggaagagtttcctttcaaggcatttgagaataactgtctcccccttgctgcatctttgatccgcccctgtctcccctatcccttatttcacgtgttgcttctgtgctgggccctttggtcaatgtcaatttctattttcctatctgtctctggtgccatttacttaactttttcactgaccccctcaactttcctgctgctgggtctggctttttgtctcactctttttatgttggtctctgattcttgtggcttctgttcatgtctgcgcatctctcaatccctgtacccctcttgcctccatctctgtttcttttcctgcatcgtctccctctttttttttgagacagagtctcgttctgtcacccaggctggagtgcagtggcatgatctcggctcactgcaacctcagccacccagattcaagagattctcctgcctcagcctcccaagtagctgggactagaggcatgtgccaccatgcccggctaattttttgtatttttagtagagacggggtttcactgtgttagccaggatggtctcaatcttctgacctcatgatcagcccgcctcggcctcccaacgtgctgggattacaggcgtgagccactgcgcccagctattttttctacttctgtcagctttcctcccttattccacagctttcctctctctgcttcatgtgtcacctctctctgtgatccctctccggatctggcctctgcctgccccacagggagggtttgcctctcctgctctcctaatctctgctgcctcaacaggtctcaccatgtcccctgcccggggaaggctccgctgctacatctgtggcttcaccaaaccctgccaccctgttcccaccgagtgtcgggacgatgaagcttgtggcatcagtattggcacttcaggtaggactctggtccaatggcccttctccaggaggctccctacctccatccatccggcctttcctgtggcccccgcctcagcatgcctctttcatcccacagaccagagtgagatcactgagtgaaaaagctgcctctcaagggcccagtgccctctgccaggctatgccacctactggctgcactcctacactctgtggcaccactgctgcgagcaggacctgtgcaacatagccgcttccccacagcagctcaccagcctcctcgcctccctgcccctctttgtggccagcttcgctgggagaggacacctcctccactagcttccgtggatctgcagcccccaacccaggataccccccgccatcactgcggccctggaaacacctgcacagacactttgagacatgcccgagaacctaattttgtacagagaccccagatctctcagcagacccctcacagacccctcacaaggcctggggaggcacctgcccagagtccaacctcataaagaacacctattctgcgtcttttgtcttttctagatgcccattgctgatgccccgtgtcagcccaggtcactggcaaggcaggcattttgatgacactgtggatctcaggcaaggggatcaaaggagcatcaggtatggtaaggaggagagtcttgctaggaaagactaatgtggtaggtcgggaactcaggatggagggcttgggggactatgaagagtacctttaataaaaggtctatctaggagtccagtaatactgcagatactgcagtgtgtgtgtgtgtgtgtgtgtgtgtgtgtgtgtgtgtgtctgtgtgtgtgtgctctaagagcaaactgtagctgcttggtgggttgggctggagctggaacctggaccacggcactcccctcattctccatctgtgtcattttcgtcctttttcttgccaatggcttagtttaagcccctgcagcctgaaggctttaggtgagacttctgagaaagcttttttccagtaaggcccaagcttgagcagagacacaaaagggcacccagtggagctgcttgtgagggtgtggctggagctcagctcatttctgcctgagactagggaatggccaagttgggagcatcaataccctccctcgcttcaccagcccagactcgcccatggttcacagacatcccagcatggccccggcccaataaataacatacccccactgggcctgccagcctgagtagacactccctctgcccccgagaaatagggtgtgacctcagggcagcaggaaggaagtgccagagtggcgatagctgctcacatgctctgaatgccccggtaaggcgccacagggaagagtgtgtgcctaggataaggaaggataaggagggggccccgggtgggagctgagcacaggcatctctatcctgactcagttccctccccttgcatgtgaggaagtctggggttgattaaatatgcctgttccctctcttctttgtgaggatgagacatggggtagtgggggtctggcttaatttagagatgggttgaggctttccattttctctgtccctccatcctcccactttgtgcttctatttttctccctctgtccatctctttccactttctctgacttgagtctcttcccttctctctcttcccccgttttccccatttgtccttcagctccactgcaatggattccccaccattgctcaagtctccagattcctgtctcctccctgtgcacacccatcctccttgcccccaccagcaacctcaggctcccctcaaccccacagtactatgggctcagggccatccctccactgctgctacaagacaggagaccaaacctttttgtaggttacatcacagaataatgctcctcctttccttcagtcccccacccctccccatacacagcttggtggctgctggaggccagctggatggtgaagtcgaactctcagtcccgccccccttgctaaggttgtcgaggaatcttccaggtgccagatggccagcgagacagcaggtcacacttcccagcagatgtcaccaaaatcacctgggcttgtgggcaggtgggctgtggggttttccagagagacagattaaggatacctctacttttcacatcctcaggaacgagggcccatccccaacccaacccgtgtttcctctccatccccagtcccctccaggatttaagcctctgttccctagctgttcctcacccaagacgggccaaatggatgttctcatagacctggatttcgggtttgaactgaggaatcgaggcatctggggagaaggagccatcagggatacagaagagaagtcagcagacaacttagagccgtgttcctcgccccctcccctagaggaggtggggtacagaggcagggtgtgagcctagccctttgcctcccacccatgtgccctcttctttccccggggagggagggactcacctctgcctggagccccacggaccctctgcctccagagcacgatgctgagggccaggatgacaactccctggcccattgtgagcagcagcatcagaatccaaggcatgtcccagcccgtggaaggggcacagagggcaggagaagcatcgatggaggctgtagtaagggccagaccagagggatgggagggaggtagtgaggggccctgtccctgtgccccaaagagaggcttcccctccacagtctggtgggctcttccaacagaagactttgtaagcttccctgcccacaatatcctccaccctactctgcccctttccaggcctctcaccctgacccatagagaatggcggccaggcacagtggctcatgcctgtaattccagcacattaggaggccaaggcgagcagaccacttgaggtcaggagttcaagaccagcctggtcaacatgatgaaacctcatctctactgaaagtataaaaattgaggccaggcgcagtggttcacacctgtaatcccagcactttgggaggccgaggtgggtggatcacctgaggtcaggaggtcgagaccagcctgaccaacatggtgaaaccccatctctactaaaaacacaaaaaagaggccgggcgctgtggctcacacctgtaatcccagcactttgggagaccaaggcgggcagatcacgaggtcaggagattgagactatcctggccaacatggtgaaaccccggctccactaaaaatacaaaaattagctggacgtggtggcatatgcctgtaatcctagctactcgagaggctgaggcaggagaatcacttgaaccagggagtcagaggttgcagtgagccgggattgcgccactgcactccagcctggcgacagagagagactctgtctcaaaaaaaaaacaaaaaaacacacacacacacacacaaaagttagccaggcgtggtggcaggcacctgtagtccagctactcaggaggctgagatgggagaatagcttgaacccaagaggcagaggttgcagtgagccaagatcgtgccactgcattccagcctggccaacagaacaagtctccatcccaaaaaaaaaaaaaaaaaaaaaaaaaaaggccaggcgtggtggctcacacctataatcctaacactttgggagactgaggcaggcagatcatgaggtcaagagatcaaggccatcctggccaacatggtgaaaccccgtctctactaaaaatacaattttttttttgagatagagcttcgctcttgttgcccaggctggagtgcaatggcgtgatcttggctcactgcgccctccacctcccaggttcaagtgattctcctgcctcagcctcccgagtagctggggttagaggcatgtgccaccatacccggctaattttgtatttttagtagagacagaatttctccatgttagtcaggctggtcttgaactcccaacctcaagtgatccgcctgcttcggcctcccaaagtgctgggattacaggattgagctaccatgcctggcctaataataataaaataaaataaaataaaataaaaagtagagaatggcaatgccccctgctcacgcatgggcaaccaactacagagcagaccaccagccataaccacactttcccctcacaccctttatagtaattcaccctttctttcaagaaaaaatagccagatgtgatggctcatgcctgtaaccccagcactttgggagaccaagataggaggatcatttgaggccagtagtttgagaccagactgggcaacatagcaagatcctgtctctacaaaaaatttaaaggtgcggtggctcatgcctataatcccagcactttgggagactgaggcaggcagatcactagaagtcaggaggttgataccagcctggccaaaatggtgaaatctcgtctctactaaaagtacaaaaaattatccaggcatggtggcgggcgcctgtaattccagctacttgggaggctgaagtgaaagaacatccctttccgtctccttcctcagtttacctgccaggctaaagctgacccctttgttgtgagtcatgaggcagcggatgattcttggtcttcggctcctgggctcagaaagcccctccccaggacacaccaagagcagggcagcctcactgccccagaaggactgaacacggcccctcacgggacccttcccttcctgccaggtcacagagtccatgcgtctgctggggaccacagagcacaggaggacattgcagggggatccatctgcagcccttgcagataactgggatcctgtaggggagagagggattcctcagttcttcacctggacttcctgggccacagtagcccctggtctgcatgcccccactcacctttgagcaccaagacgtcgtacaccctccagttctggtagttgtggtgctgacctagcacagcgcaccagtaccgcccggcatcttcctctttggatccctccaaccacaaagaatagttccccagcagtctgagcctggattcccttcctggttttccagggtctggggctggcctgcccacttggacttgggctaccagggtggtgaaggagcctgctgcagggctgcagaaccatgacaggtgttcgtccccatgtagagtagatggtgagggacatggcagctctactgcctcccccaaggccacatagatggcctgcatgttgtctgtgggaagagggttgtatgaggccagagacctccatcagatcaataaccccccatttgatcttcaaccctggcttccttcccttctggggtcccccagcacaggcctggctggtgaccacatttctcaagtgacagctacaaaaataagacaggtggagagaagagggtaagggctttcctcctctctcccccagccagtgagggggtctgagggcaagagggaaaaggctgaaagttggcaaatgcccacatctcttctactcatttctacttttctggaagcatttactcattcttcttattttataaaggaaactgcataacctggaccctcgttgcctctgggtcttccctagtgtcagaggcaggaggaggttggttggggtaattctatcttcttgagtcagatgccttcgccaggctcctaggagaaagagcagtagtccctccccaaccttgcaaatagctaaggaatcccgtacctcttgccccttacctgcagcctggggagttccacataggaacaggaggaggaataagactgccatggggagagcctgccaagttctcttgctccaagacctggtgtccccagggaggaagcagagtccagataaaggcccacactcgctggtctggagtgacaaggggctctggaggggatgggaatgctggggcgataaagcccagcagcatgtctactagggataaagtgaccaccacttttctatcctggagagaaaaggacccagcccaggccactctgaagatgacctttttgctcttctgattccacatcagctaaggggctcaaataaagactttccatgcaaaaaaccatgcagagaagtggtcctgcctgtctagctcttgtcagtctggaagtacattctgaggtctctttcactcctaagaaaggtcagccatgagttgggtggatcacttgaggtcaggagttcgagaccagcgtggccaacatggcgaaaccctgtctctacaaaaaatacaaaaattagccaggcgtggtgacatgtgcctgtaatcccagctacttaggaagctgagaggcaccagaatcgcttgaacccgggaggtggaggttgcagtgagccgagatcgtgctactgcactccagcctgggagacagagcgagacttcatctcaaaaaaaaaaaaaaaaaaaaaaaagaaaaagaaaagaaaagaaaagaaatgtcagctatgagtgaagaaactgagtttgagtttttatgttggtcctccacagaacccagcacaagactgtgtatcgagtcagtgtcccgtaaatgatttggaatgactttccctgtggttgtctggcataccccggacctctcctgaaaccctaataagtgtattaaattattactcagggacaaggctaacgggctgattcatccttctgaacggcaaaaactcctaaggcagatcttcatgcagttattacagttttaatgtgtaatttatttatttttaaaattattttgatgaaatattccatacataccaaaaactatatgaagtacaactatataatggataaatgcttaacagagtagaagactggacagcaatgagaatgaacaaacctagtgatttgcaacaaagttgaatctcacaatataatgagagtaaaagaagcctggccaggcatggtggctcatgtctacaatcctaacacttttggaggccaaggtgggagggttgattgaagccagaagtttgaggttgggcaacagagcaagaccccaactctgaaaataaaggccagacgccgtggctcacgcctgtaatcccagcactttgggaggctgaggcaggcggatcacgaggtcaagagatcgagactatcctggccaacatggtgaaaccctgtctctactaaaaatacaaaaattagctgagtgtggtggtggatgcctgtagtcccagctactcaggaggctgaggcaggagaatcgcttgaactcaggaggcagaggctgcggtgagcagagatcatgccactatactccagcctggtgacagagcgagactccgtctcaaaaaaataaataaataataaataaataaataaataaatagaatattccaggccggactcggttgctcatgcctgtaatcccaccactttgggaggatgagacaggcggatcacctgaggtcaggagttcaagaccagcctgaccaacatggagaaaccccatctctactaaaaataaaaaaattagcagggcatggtggtacatgcctgtaatctcagctacttgggaggctgaggcaggagaatcgcttgaaccccagaggcagaggttgtggtgagccgagatcgggccattgcactccagcctgggcaataagagcgaaactcggtctcgaaaaaaaaaaaagaaaaagaaatagaatattccaggccaggcacagtggctcatgcctgtaatcccagcactctgtgaggccaaagcaggaggttcacttgagcccaggagttcgagaccagcctgggcaacatggtgagaccttgtaaaattagccgagtatggtggtgtgggcctatagtcccagctactcaggaggttgaggcagaaagatggttgagcccagcaggtggaggatcagggcagtgagccgtgattgtgccactgtgctccagcctgggtgaaagagctagaccctgtctcaaaaaaaaaaaaaaaaaaaaaacagaaaaaaagaatattccgtttcagtcagagatcctctatgctgtgtaaccacaattctgaattttctctttcttctccacttgctttatcattaaattttatgtgtttttgaatctaatatactagtatcacgtatacattcttctgtggctttctattttcactcagcatcatggttttaagatccagttcatgcataacagtaatgattcatttattttctttttacaaatattccgcatatcttactgtgctgaattttcgtatccaggaccatggtgtagctttccatttattgaaaagcttttcgtttacctctttctttttttattttttcaattattattgttattattttgaggcagggtctggctctgtcacccaggctggagtgcatggagcgatctcaaactcccgggctcaagcgaccctcccaccttggcctcccaagtagctgggactacaggtgggcaccaccacaccctgctaggtcttttttttttcccccttggtattttgtgtagagatggggtctcactatgttgcctgggctggcttggaactccagggcgcaagcaatcctctctcagccaccccaagtgttggaattacaggcatgagccatggcctggaactcctggacgcaagcaatcatccctcggccacccaaagtgttggaattacaggcgtgagccaccgcgctgggccagtttacctttatttatttatttagagacagagtcttgctctgtcaccaaggctgaagtgcagtgggaagatctcggctcactgcaacctctgcctcccgcgttcaagcgattctcgcgtctcggcctcccgagtagctgggattacaggcgcgcaccacccatgccaggctaatttttgtatttttagtagagatggggtttcaccatgttggccaggctggtctcgaactcctggcctcaagtgatccccccgcctcggcctcccaaagtgctaggactacaggcgtgagccactgcgccgggccgggccagtttgccttttcaataactttttatagttttcttcataaaaccttgcatttcttgtactagatacattcctagacaccttatgttttcggttactcttatcaagtactcctaatctcacccctcgtttccgctgtcgctctagagtctgccaataatgagacagaaaaaaattattgaaccatgcccggtaattttctgattctccgcgttctagtggtcttccactagtttcggaccactgctgtacccgtagctccaactgcgcgaaactcttctcaggaagcactgaaaatgtcgcaactcgcccggaggcggagccggtacgggctgacgtcaagggcacacaacacctcagaggcagggagggcggggccggcagggggacctgctgctggaagagcagcggcccgagccggggccatggcgaagctgctgagctgcgtcctaggcccccggctctacaaaatctaccgggagagggactctgaaagggccccggccagcgtccctgagacgccaacggcagtcactgccccccattccagctcctgggtgagtcgagttcctccccaccgaagaacgtggtacagtccaaaccctttacggccttttgctccccagaagtgcccataatgggaaataaggggagcctgcttgtcaagccagttatccgcaaaatctgcgctctgtgtgcttcctgagttaaagtcacgcctacggactggccgcctcctttctttttcgctctttaccgctttctcattccgactgccactctttgttctttcctctccgcgtccccccgaccctgtgtgtcgtggttcgtgccggtcccagttgagtcttgagtcccgggaagagaccctgcgcggactggggagccgttgaattttgctgtcagactcccagtttcctcttcttcagtgcctcttcatgcctcccccggctctgtttttatcttccctttaccctcgccttgaatttcagaatgacttttacagatcctgtatccgtcggtcctcccctcaacccccgcccaacctagcctggagacccgagtcattgtattctggagagctggcgggtggtggtaggctgttctaaatattctcttcctttttatcagttgtctcattgtgttactgtctcctacaaactgcccgctcctacccacattctcttcttagtcaactactcttatttctgatgcttttctttccttcttagattgtctaggtgtcttttctttcttctcaaactaacccttctccccacatgcacgcgcctgcaatccatttgaaactaggctgtggaaaaggagcaaaaatcgtccaatgctgctttcacttttgcttccaaatccagctccctgtgtttgttcccatggtcaggggtgggaaattaggttcagagtgagggtgaggaagaggagtttctgtgggggccagggatgtttcaagagagatagtcaacgagactagaaccagaggacacacagcagggcttctgaaagggaagggaaaggacctgccagtgggcagggtccttaaggaggccatctgttttggcaggatacgtactatcagccccgtgccctggagaaacatgctgacagcatcctggcactggtatgtctaccctggcatctgggactctgcatctttcagacccacctgtcctcttgaacttagccctccctaacttgggagcaacagtgccctggggttgggggatgccctgggctctgcagcagacctctccaacacagacacacaggcacactctaaatgtgcatacttggcactcccctttggtatgtagcactgctttctctgggggcaacctgagccgtaaggaaaacatgtttactcttgggaccatctgcaggtgctaagtcctgcagttccccagtgacctgtcctccctggcaactaacctctttggctgcagggacagctgttctttctggcacagttcctgtggtgacgtttgcgcatctcttggggaccaggccaggggctgtcctgagcagggccaattgaaaaggcttgattaacttgagtagacagagagactgcctttaaatgtgatggaattatgtctggagatggaagacataattcttccataattccagaggaagaaaatagagcctgtaccaaattttcccagcctccattacattgacacactacttttcaacaaatactgagcacctactgtattcatggtgtcatacaccaaatatgatatgatatccctcaggttgtccatcttgctcagagtgtatagtatatgcctggaatggcaggtgtgtgtgtgtgtgtattgattgcctgtccctgtctctctgctgcaggcttcagtattctggtccatctcttattactcctctcccttcgccttcttctacttgtacaggaaaggtcagtgtggtttcaaaggtggtggggtagcaaatgggcaggttgttggcagatgagccagctccctaaagaggagaggggacctgtgaagatggcttggcttccctcttccatcaggcatcttcttcctcttagggtatggctgttccaaacagggagtgtggggtggaggttggggctgaactgggaagaggagctgagggacattgcggagagggtctcacattgtccctctcccttcccaggttacttgagtttgtccaaagtggtgccgttttctcactatgctgggacattgctgctacttctggcaggtgtggcctgcctccgaggtaggtggagaggaaacctggtttgaatcttatctgtcactgtcactggttaaaaattaagtaccttgtgcaaatacattttagtgatgggcctccgagagggaatcattgagaatggtttaaggcatgatcttttccttaaaagacttgggttataaatatgaaaaaataactgaaaagtaacaaaaaggtttgcttttttttttttaagagatagggtctcaccatgttgtccaggctggtctcaaactcctgaactcaaagtgatcctcccacctcagcctcccgaagtactgggattatagatgtgagccactatgcctggctgcttttatctagaaaagatgcatataccctacaacaattctatatatgtatacatactaggaaaactcctgcacatgtataaacaatatagatgtacaagaatacagcatacaacattgtttgtaataatcctaagctggaaacaactccagtggctacaaatagtaggatggataaaatatgttctgtgtggccgggtgtggtggctcatgcctgtaatcccagcactttgggaggcagaggccagtggatcacgaggtcaggaatttgagaccagcctgaccaacatggtaaaaccccgtctctaccaaaaatacaaaaattagctgggcatggtggcacgtgcctgtaatcccagctacttaggaggctgaggcaggagaatagcttgaacctgggaggcaaaggttgcagtgagacgagattgcgctactgcactccatcctgggcaacagagcaagactccgtctcaaaaaaaaaaaaaagttccatgcaatagccatgcaagagaacactatatagcaatgcaaatgaacaaactgtagctacgctcaacaacgcagatgaagccaggtgcagtggctcatgcctgtaatcctagcagtttggtaggctgaagcaggcagatcaccagaggtcaggagttcaagaccagtctgtccaacatggtgaaaccccgtctctactaaacatacaaaaaaaaattagccaggtatggtggtgagcacctgtaatcccagctattcgggaggctgaggcagtagaattgcttgaatccaagaggcagaggttgcagtgagccaagattgcgctactgtactgcatcctgggcaacagagcaaggctccatctcagaaaaaataaaatacaaaaaattaactgggcatggtggcacatgcctatagtcttaactgcttgggaggctaaggcatgagaactgcttgaacctgggaggcagaggttgcagtgagccaagatagcaccactgcactccagtctgggtgacagagcgagactctgtctccagataaacaaaagcaatgcagatgaatttctcaaatgttgtgttaaatagaagaagctaaccacaaaataatgtatgcagtatgttttcatttatataaaattcaaaagggatgtgcatgtttgaggtagaacaccgaagacaacaagggcatggttttcttttcttttttttttttttttgagacggagtctcgctctgtcccccaggctggagtgcagtggcgcgatctcggctcactgcaagctccgcctcccgggttcacgccattctcctgcttcagcctcccgagtagctgggactacaggcgcccaccaccacacccggctaggtttttttttattttttagtagagatggggtttcaccgtgttagccaggatggtctcaatctcctgacctcgtgatccacccgcctcggcctcccaaagtgctgagattacaggcttgagccaccgcgcccagcaagggcatggttttctcaaaagttaggagagtgattacctggggtgggggagaacagagtgggggagagccctgctgagaggtggctgtgttctctttgttgacctaggtgatagtcacatgaatgtttgctttgtattttttaaactgaatatatgttttatgtacatatgttgtatctcgcaatttaaaaaaataaagaggacagatcacctacccctagtgggtacataagatgacaaccaggtgatgggcgatgcttcaacatgggggtggtggggtcagggctggatggtcgcagttgggtccaggaccttctgcctgaggtgttctgccccctgatctctgcaggactgggctctctcctcagagaggccttccctgaccaccctgtctaaaagtagctcccactgctcagttttgtcttagttttttattttatttatttttaatttagaaaaaatacagaaaaaattagctgtgcatggtggcgggcgcttgtaatcccagctatttgggaggctgtggcaggagaatcacttgaacccgggaggcggaggttgcagtgagccgagagcacatcattgcactcccgcctgggcaacaagagcaaaactctgtctcaaaaaaaagaaaaaagaaaaaatacagaaaagtccagagaacaaaatataaaagcctttttaaattttttgatgtatagttttgtgatttttttttttatatatagttttgtgatatttgctttaaatgctttctgtcaacaaaatactaaagcaccacagttagggttggagttcccattggaatcctttcagtcccatcttcctctttcctcagaagtaataattgtcatttggtgtgggttttttttttttctggcacatacttttatgaaacatatacctcagttcctcaagtctaagctgccatcaattgtaaaatgaattctaatttcagagttttcaagggttaaaaaatatacattttagaatctatgaaatatggtatctataagcagtatgtattattttgcacattttacatttttggcataaatgttgtacaaatcattctgcagcacacatcattctctcatcatatcgttttgggggaataccattgatgacacataaagttctggttcattcttgttgtattttctctgtagcacttatccctctctgaaatgttgtttattgtcttctcctggctgtacctaaccccaaccagaatgccagctctctgagagccaggagctgtgtatctcatttcctgctgagtctcccgtgtgtagtacggtgcctgtctgacacacgacacctgccaagtcagtgaggagagaagttagggtttgaggtggctcagcagtgaaaggagagtggatgcaatcactgactgtgtaagtgaaaagagagaggagagagagtcagcactgagagttgcttctgctttagaaaggaaagcagaaaggaggcaggagaggaactgttcaggaactggaaggagtcaaggatgggcccaggaagcagaggcaggaagaatcttgagggacagggagaatgctgagtagtacagttgaagagaatgaggatagaagagtcaggaattcagtgaggaagtaattatgggcaggagtcggagactctgaagccagatggcaaggggctagaatatacagaaaagaggcagaaagcaaacattggagaagagtggcagtgaaaaatagagaaatttgatattcgcaagggagaatagtattatatgatagtgtttaatagtgtcatttaataggttatatgacagtgtttaaagactgaggaagaggaacattctggaagatggtaggttaaggattgtctataaagacacaaactgcagaagctagggagaagaagcgtcctgtagccagttgctggatttggaggaagggggttggctcacatctatttctccgcatcctatgccctcagttcctttttctttcactttttcttacagggccttcttctagcccatctccaattcttttcctaaaacctaggctttctgcttcccagttttcctagcactgtttcctgtcctttttctaccaggcattggccgctggaccaacccccagtaccggcagttcatcaccatcttggaagcaacacatcggaaccagtcttcagaaaacaaggtgagaggccctaggaaaagtgccacacaggcacccaatagcagctttctcagttgtccctcagagcaccagacactggcttctgcaggaagaggaggtgtgttttaccacccaccacactgggtgtttgcttgcacattgctgtatcccttctcacctccattagtgaactgtccacctgaggaatttttcctccctaccacttctaatggaatattctgctagaacaatcttccccctccctcacctgtaagaactggctaaactagaaacattccacaatgtttcttttttctttttctttttttttttttgagatggagtttcgctcttgttgcccaggctggagtgcaatggcacgatctcggctcactgcactctccacctcccaggttcaagtgattctcctgtctcagcttcctgagtagctaggattacaggcacgcaccacccacaccctctaatttttgtattttttgtggagacggggtttcaccatgttggccaggctggtctccaactcatgacctcaggcgatctgcctgccccagcctcccaaagtgctgggattacaggcgtgagccaccactcctggcctctttttttttttttcttctttgagacagagtctcactcttactcaggctggagtatagtggtacaatctcagtttactacaacctccaactcccgggttcaaacaatgctcatgcctcagcctcctgagtagctggaattacaggtgcacaccaccacgcccagttaattttttttttttttttttgagacggagtctcactctgtcgcccaggctggagtgcagtggcgccatctcagcttactgcaagctcggcctcccgggttcatgccattgtcctgcctcagccccctgagtagctgggactacaggcgcctgccaccacgcccggctaatttttttatttttagtagagacggggtttcaccatgttagccaggatggtcttgatctcctgaccttgtgatccgcctgcctcggcctcccaaagtgctgggattacaggcgtgagccaccgtgcctggccaatttttgtatttttagcagagacagggtttcatcatgttggccaggctagtcttgaactcctgactgcagacgatctgcctgccttggccttccaaagtgctgggattataggtgtgagccactgtgcctggcccacagtgtttctttttttttcttttgagatggagtttcgctcttgttgcccaggctggcgtgcaatggcatgattccagctcactgcaacctccgcctcctgggttcaagcgattctcctgcctcagcctcccaagtagctgggattacaggcatgcgccaccacgcccagctaatattgtatttttagtagagatggggtttagctgtgttggtcaggctggtctcaaactcctgacctcaggtgatccacctgccttggcctcccaaagtgctgggattacaggtgtgagccactgcacccagcccacaatgtttcttagaaggtagttttctctgtatcacagcagctcagttctataaatgtttaattttgttgtatgcattgaataccatgctatccttgtttgtggatgggacaaggtggacaggtgtgtccactcctatgcctgggagtacagcatggtgccaggagggagaaaagctagggctcagtgtcttgggaattatgccaagccggctggtgctggactgtgattatctttgaggatgggctttggggccccataaagctcttttctgttatgggaggtttctaggatcaaacagctatgaccaccatcatcacattcctggctactccacactatggagctgcgtaatgatgccctgtactatgctactggctgaagcatttggcacacaccctttctgatcctcacaacagctgagtgaggtggcattattacctttatttgtaaatgtgagaaaacagaggcaaaaagaggttaagtgacccattcggagtcatagagcaagaaagtggctaagtccagatttgagagcaggtctgagcaaagcctgcctgaaatttgcttttagtcatcttgttttgttttgccatttacctttttgtataatttttctattgctctctgttagtcaaattatttttgaaatgtcaaaaaatttctgtgcagaaaataaaaaccctcaaaatagagtgctaggagctcagggggtgggggacgaatatagtcaagtattaagacacagctaggccaggcgcggtggctcacacctgtaatcccagcactttggaaggccgaggcgggtggatcacgaggtcaggagatcaagaccatcctggctaacatggtgaaaccccatctctgctaaaggtacaaaaattagccgggcatggtggtggcaggcacctgtagtcccagctacttggaggctgaggcgggagaatggtgtgaagccgggaggcagagcttgcagtgatccgagatcgcgccactgcactccagcctgggcgacagagtgagactccatctcaaaaaaaaaaaaaaaaaaaaaaaaaaagacacagctcccactgccgtcaaaaaacgtggagctggtgaggtggttcatgcctataatcccagcactttcggaagccaaggcaggaggatcgcttcagcccaggagttggagaccagcctgggcaacatagtaagaccttgtctctaaagaaaattttaaaaattagctgggcatggtagcacatgtctgtagtcccagctactccagaggctaaggtaggaggatcacttgggcctgggagtttgaggctgcagtgagctatgattgcaccaactgcattccagcctgggcaacagcacgagaccctgcctcaaaaaaaaaaaaaaaggcatgtggactggctcagtggggtggcccgaggttcggatgggctgtagggcaacactgatccatggctgcaggagttgaggaagggatgtagttgtgaggatggaagtcagagcttccttcaacgggtggccccacatggcagaggagcccactgtgggcgtgacttccctcctctctgtctcactcaaccttgggtctgtcagtgtgatctgctgggagatttctaagcttctaagacagcaccctataagggacccaggtggggaatagaccgtgaccagccagcgacccctactacccgtcactcaaaagcactagcaccttcagccactcctcctgggggtgggtcagacttagttttttagaaaagcagagtgttaggttcttagcttggaagagggcagacaggccagtcctgatacctgatggggcataccatctcccctgattttctggtcctgttagaattttccatctgagaattgggagggtattgacctccgcttggtttccccatgatgtgtggggatcagacccctggataacgaaggtgttgttgagggtgggtaggagagcctcccctgagttctcagtacccctttgcctctcgtgcccactgcagaggcagcttgccaactacaactttgacttccggagctggccagtcgacttccactgggaagaacccagcagccggtgaggccccagttcttttgctgtatctctccccttagaaccattccagaaaatctctgctctgccctcccacctccatgccctctcaggtcacagtgcctgccttccaatgccattatgtcgttcctagaccccactgttctccagacctcagacatccagcttgctgctcctgaccctatccttccctgcatctttcccttcctcaggaaggagtctcgagggggcccttcccgccggggtgtggccctgcttcgcccagagcccctgcaccgggggacagcagacaccctcctcaaccgggttaagaagctgccttgtcagatcaccaggtgggaaacagcagcgaggagaggcccactggggtggaggggccatttcaggagtgctctgggagtgggcgctccattgtaaaatagctgtcactcattgggcctagtgctgtatggtttgtgtagatcatttatggcaaagtcatttttatccatatttatgtttgaagaaaagaggctcagagaggtctggagtctcaaatgtagtaagtaaagaactgggatatgaacaaaagctccttcagtgaggctgaaaaggagcagtgggggtggggtgggggtggggaggacacacacttgtagctagggcaggctctggtagcatctgtgtacccatcgtggcccctctgccctgttgttattccaccttggctccgggcccctgtgtgcctcagtgtctgcacctgtgatgaacctgccctgcaaggttgctgaggagattaagtaaggtaacatgttctgaagggctcctgccttgcctgggtgcttgagagcacatggtaaatcccaaataaagctcagtcgtgggtactgatgatgtcagaaggaacggaaataaccacctatatcttatagtggaacagacactgggaattttcttttgctgggagttaggaggcagcttctagaataccaaggaacagggtggacttagtggttggttgttgacagtgtgctaattagtcagggaggcaagccatatttgaggttttgaattataaccatcattttttaaagcattatttatttggggacctttaatatgttgtacttatattttaacagaatcataatctgatgataactttgcatttacttattatgtatagacagttacatcataaaactctcagaattctgtacatacaggatatgtgtgcactgagccacaatataaaatgtttatcttacaaaggttgcagtaagaaaagtttgcaaaacactagcctggtacatatttcattaaggcttgaaagaggaaagtaaagctgtgaaggtcaggggtaaagcaggccttacagtctgtgagtgctagggctgggatggtccccagcacagtccccaggcctcaccagggttggggtttgttaacctgtgttccccacagctacctggtggcgcacaccctagggcgccggatgctgtatccaggctctgtgtacctgctgcagaaggccctcatgcctgtgctgctgcagggccaggcccgactggtggaagaggtgaggcttccctgcccgcacatcccctaaagccctcccctctcacccccacccaccccgccccacccctgtgatgtggcctcctgacccttgcatcttggccattgcgtcttccgtactcagtgtaatgggcgccgggcaaagctgctggcctgtgatggcaatgagattgacaccatgtttgtggaccggcgggggacagctgagccccagggacagaagctggtaagagggagcagagagcccagaggtggggtgagtgtgaggaaggcagtagaggtctggggaccccaatgctatagcacctccctgaaggaaccactactggggataatctcatgtcctagctccacgctaaagaccttgtgatgtagtgaaaccctgtgatagagaaacagatgaagtaggagagacgttcaaggacgagaaactaatattaatagttaccactttgacagcacttcacacttatatatatttaattctcatatatatatgaagcatatatatttaattctcaaaagaatcccgtgagataggtactgcttatattagcccattttacaggagatgaaactggggcacagaaaacctttcctggacctcacagtaagtggtagagctggtatttggacccaggcagcctggcctcaaagtctcctacctccatgaagcagccgtggaaagagcgctaagccaggagtctagggagctgggttctagtcctggctctgcccatctgttatgagagttcatgcaaatcccaccattcgtgggtttcagcttggggcgccatggcattacagtttatctgaccataagactggagctcagagagggatagggagagcaatcagcataccacacaatagcaatggtcacagaagataacagacccgaaaacgagaaaggaaaaacatctccatagtccccttcctgaaagagatccagctggtaatcttccaaggaaaagacatggctgggtggtcgagcaggtcagcctctgaggagtatttgtaatccctttgcttctcctcttatggaccctgtggaatgagaagcttccattccccttggagaaaacagaaacctgccctttcctcttccctgcaaagctcttcatgggctgccctccctgcccaaagggagtttttcagtcccaacttggccccccagcccttccttcctgcctccttcctaggtgatctgctgtgaggggaatgctgggttttatgaggtgggctgcgtctccacgcccctggaaggtaggacggtgactcagcctccttatctccgccctttgaaagggaatgtccctgcctcccacactgacctgacctcccctggcctctgctttctctgggtgaggttttgagtctctcagctttagggaaaagtccactcgccatttgctttgataaccttacatccctcccctggcctgtgtccctagctattatgcttttcattctgttccattcccccaccacacaccccacacaatcacatgctgctccctgtgctgcctcagaacctctggtgtcatctcctatttctgggaaggcttggagttatttgcatctaagctggggggtacttctgctcttccttcccccagggatggagaaagggctgtgggccacaaggtctcagtccttcctccccctgtgttacagctggatattcagtcctgggctggaatcatccaggctttgctggaagcacggtgagaccatctcaggaatcccttccttttcctgaattatgtctgtttccctctggtcagccattggagggaggagaggggctgtggatttcttgaaggcctcccactcacctgagggctggggtctaggaggttgtgaaggcagcattgggagccatgcccccatccccacagtgcggggctagcaggagaggaggaggtagatctcattgtacacatccgtcttctggagagaacaacctctcctaccatcccttccttctacaccttctctgcctgtcataggtggctgcaggaggggtccacgttgggagggacaggtgagctggcctttggtgctgacacactcctgactttgccctttctcctgcagggggtgccattcccgcagaatgaggctaatgccatggatgtggtggtccagtttgccatccaccgcctgggcttccagccccaggacatcatcatctacgcctggtccatcggcggcttcactggtaccagcctccctcccatcccccactgtagacacattcatgaccacccagccccacccgggagaggtggggaaatggggtggggtggaggctcaaggaagaagagagaggaagtagaatctctgagtgggcctggaagaagctatcctatttgcatacacttcacctttccttcccctcttgtgcccagtcattaaaaggaaaagcagacccaggtcctgggtggggagatcagggaaagtgaatgtttcctgcccattatcttcagtgcactatctccagtgttctatccccatcctctccagatagttccctaaccaagtgaagtaggttaagaaaaaaacaagggataacatagggggaatggggttggcctatagggtcagtgggatgagagcatgggtggtggggagaaaggagcctttctcagttcttactcttcttccctgccctggtaccagccacgtgggcagccatgtcctacccagatgttagtgccatgatcctggatgcctcctttgatgacctggtgcccttggccttgaaggtcatgccagacagctggagtgagtgcagctcccaggcctgcccttcctgggaaggggtgggctggaactgggaactgttctgagatggctcccttttcttgggtggggagtaagtcgccccattgttggaagcaggaggactcctttgtctgggggcctcagttttctttctccgtgaatagtgaggacctttatgttgggcaagggctttgtctctgccatcccttcacctttatcccactctagggggcctggtgaccaggaccgtgaggcagcatctcaatctaaacaacgcggagcagctgtgcaggtgagggccggccagcgtccggcattgaacacctgccccccatacagctctgctgggcgctcaaaccctgaaactagtactaaagtgcaagttggtaaaaggccactggctcacatcctgagtgaccctgccaccacctcaactggcctaacccctcccaggtcccctgggactctggaccacctcaggatctggcaaccaaagggttaaggcctggcacggcaggggtctcccagcagggccagactgaaccatgccccttaaataatcccctctcacccctgagtgaagggctaggtcaagggctgtgctatagcaaggggagggtaagaatgctaccagtgcagggataggggtgggccagttgtcacccgtctccctctgagctctcccttcccactgctctgttctctgaagataccagggtcctgtactgctgatccggagaaccaaggatgagatcatcaccaccacgtgagtgcgtgggaatctcggccctcaggaaccccagagatggccaggaacttgtcccttctacctctgcccaccagaaacctgggtatctagacccttcctcctaacctccagcccctccagggtacattcttctcacccccagggttcctgaggacatcatgtccaaccgaggcaatgacctcctgctgaagctcctgcagcatcggtgagagccagggtgtgtgcgcgctgggggcagtgtacacacacagatactgataccagcacagggaaggagggaggaaggttcagggatggtgaatgaaaaaaaatcagccctgacctgtcctggcacttcctccgtaggtatccccgggtgatggcagaggagggtcttcgagtggtgaggcagtggttggaggcctcctcacagctggaggaaggtgagaagggatccagtgaggcttggggcgggggcccagcaaggtcaggttgctgactggctgtcatctctctccctgaccagcctcaatttatagccgatgggaggtggaagaggactggtgtctgtctgtcctccgctcctaccaggcagaacacgggcccgacttcccctggagcgtgggtaaggagctcctggggcaggagagagggtgggaagggcctaggaaggggatgaatacccagatgtgtggcctattttgagcgcctcctctctgcaggggaggacatgagtgcagatggacggcggcagctggctttgtttctggtgagctaaggagtgggaagtgggaagggttcttgaatggccagggctcacatagggggactggggataccctataagcattggaagtggcagcttttgtagagtgggtggtggatgcggaagtggagggtggggagggagtccagtggctgcccctcccaacagtgctctgtaccccacctgtcccacctcctttcctcaggctcggaagcatctgcacaactttgaggccactcactgcaccccactcccagcccagaacttccagatgccctggcacctctagggaccaactgggactcattatggaagaatggggtgagaggagacatgaggaaagaccctcttatttgtgattctctgtgttcatgttgctgtttatagtttgtggaaagtgggggaccatcccccttctcaccactgttcctcttgcacgtttcccctcattcatgtggctgtacttaaccttctccaacatacatcctgcattacatgaatggattattcctaataattaataaaaaggtattttttctactatctggctaattgtataacttctcaagtgtccagggagccaggggcaggtagtggggagagcagaggccccaaagagctgggctttgggaaaccctaactctagacaatctagctaatctaacccttcccatctctgtgtccccctaggccttcagcccctaacctgagctttcctcaggcagcaggtccccaaacctccccggtccctgatgtgcctactgttatcacaactgtgcagcctccctggcccctcccgcctccttcttcagttcttcctgcatacaaccaccccaggagcccatggttgccccctcctgcttacggctcatgagctttctaggatccgatttcacctacccagtgcttctgctggtttccaggttcaacctgcatggtgttactagcagtacccccaattttcattgctcacctcttgttatcttggtgaagagtgaggaagggcctgctccccacgtcttatgcagcaaaccctgcacacccaccttgccatgtcatcaagtctctgtcctcacagcctttttgcagttcaacaaacacaggccctgccagggacggagggccaggtgccaaggactcatgtcttctcagagccatactttgccttttggacggctctgttaggagaagatgcttaggttgtacctgaggaaattggttccctataactgccatctatctctaactttggaccttgtggaacacagtgaataaatccctcttccacccattggtttgttgcctggcagttttttttatttttttggagatggagtcttactatgttgcccaggctggagtgcagtggcacaatctgagcttgctgcaacctccacctcccaggttcaagtgatcctccagcctcagcccctctagtagctgggattacaggtatgcgccaccatacccagttgatttttgtatttttagtgaagatgaggtttcgccatgttggccaagttggtctcgaactcctgacctcaggtgatccaaccgccttggcttcccaaagtgttggggattaaaggtgtgagccactgcgcctggccgctggccactttcttcatttggaaacttctcttttccagatgaaagaccccaaagtttatcgccctgagtccatttttgttttgttttgttttattttgttggggatggttttttgtttgttttttgagatggattctcactctgtcgcctaggctggagtgcagtggcacgatctcagctcattgcaacctctgcctcccaagttcaagcgattctcctgtctcagcctcccaagtagctgggattacaggtgtgtgccactacacacagctgatttttcgtattttagtagagacaggtttcaccatgttgcccaggctggtctcaaactcctgagctcaggcaatccacccacctcagccgactccattctttttttttttttttttttgagacggagtctcgctctgtcacccaggctggagtgcagtggcacaatctcggctcactgcaagctccgcctcctgggttcacgccattctcctgcctcagcctccctagtacctgggactacaggcgcctgccaccacgcctggctaattttttgtatttttagtagagacggggtttcactgtgttagccaggatggtctcgatctcctgacctcgtgatccacccgcctctgcctcccaaagtgctgggattacaggcgtgagccaccgcgcccggccaactccattcttttgagcaagatacttaacgtgggcgacaatgttctaatgtcctagatggagtctctggctaaatttctgtgtcttctccaaacccagtgcatgaagctcttcttgaaaccccagggcagaggctgtgtgtgcccccattagcgctgcaactccttaagggaagatatactgagtctccactggaagtggagatctgagacttaatcaggtgatgtgatgcctgaaatttggagttagaagaggcaggtgaccacagctccataatgctccaccgttagcaaacaggtggatagctgatactggtgccctctcctctatcccattccaggggggcaaacgatgggaagtgtggaacatgaagctctggagccagctgcacagttctgaatcccatcctcccagatccaacagaagagttaatcccctgaaaactaaatttttgttcagctaagggaagctccttaaatgcaaagaggagctgggcatggtggctcacatctgtaatcccagcactttgggaggctggggcaggaggatcacttgagcctagaagttcaagactggacagggcaacatagggagactccatcagtacaaaaaatttaaaaattacccaggcatggtggcatgcacccgtgttccaagctactctggaggctgaggtaagaggatcgcttggctgaggatcacggtaggttgaggctgcagtgagctgtgatcgtgccaccggactccagcttgggtgacagagtgagactctgtctcaaaaaaaaaaaaaaaaagcaaataggggtgcccagtctcacctcccataccctggggacaaaggacacccctccctggacatggccattagggactctgctgaactgcccctactgccactttcccccatcttactgcatgtaattgtagacaacagtggatgacctgaggggcccttagatacctgaaattgggtagggaaagaaaggtaggctcaacatgtgaattctgaacccccccatccaggggcctcagcctacttcagattactccctatgcaataaggttcagagcagctgtgtttgttttcagaactaatccccacccaggggtggaagcaggcccctgtccactcctcaccctatatagcaaagttccagcagttccaggggatgatcagcagagatgcagaccttcccagttgctggggcgctggaccctgctatactggacacaaggtgaggcctgaaagtccaggcaccctgaggagctgggcaaactagcagaaaagatggcgctgggagaaaggaaagttagactctggacgggaaatctggaaagaagtggttcccagctgggccaaaaagcctcatcctacgccgtctcatcgacctgggctccaccctgagtgcctccagtgtgaggtgctggactggctctgtgctgcctgtttgggttgagggtttgctcctaggagaggcatgtatttctcgtacagctgtcacaagcgagtgagggctccggaggtggagggcccaagagggtggggagctcaggcgtcagtgatagccagatttccatccatcggtccgtccgtccgtccatccatccatccatctatccaatcaacaagccattccggattcttcaggaatccagtcattcatttatatttaggttaaagaccctctctctggttcctctctagaacgcaatctcgagccgctcccccaacaaaccgtggccctctcccgaccgggtcatctacagccccgcccctcgtttgcctggctccattcccctaaccttggcgttctgtcctcaggccccgccttctttgtttcgtcactcggttgcttaccctcaggtatcccttaactctaggtaggagcactcagaagggacaccgtcatctgctgctgtcgccatggcgattattcaacgccctgcctcttcaccccaggaaaaccttcgcggaacccgtcaccatggaaacgaactctctggactcttagcgcgccctgggctggccctgctgggtggacaggagaggagcaaaacgcaacaaagacgggattaattactcggaggccgcgccccctccgaagaaggccccaccctgccccggcctcacccctccccgaaataattcgaggaaatattccgcgaatgctgggtgggtgtcttgccccccggttccctcaaggcccacggtcgcttgaattccacagcaagtcctcccggacctctcagggcaatcccctcccgaagcccagcctcagcctcgcaaagcctctagtcgttggccttttcgttgcgattatattcgagagggagcttcagagggcgccgcgaagttcccctgtgcttcccctttgccctttgccctcttcgcttcaagaggagccctggctctcttttttttttttttttttttttttttgagacggagtcttgctctgtcgccaagctggagtgcagtggcgcgatctcggctcactgcaacctccgtctcccgggttcaagcgattctcctgcctcagcctcctgagtagctgggactacaggcaggcgccaccactcctggctaatttttgtatgtttagtagagacggggtttcaccatattgtccaggatggtctcgatctcttaaccttgtgatccgcccagctcggcctcccaaagtgctgggattacaggcgtgagccacggagcccggccctctgattctttttgtctatcactctgtgcactcattcattcaagacatttatgtaggtgccccgcgttcctctgcagttctccactactctggcttttctctaatacaatttattttgtgttattatttctttaagacagagtctcactctgtcgcccaggctggagtgcagtggtgcgatctcggctcactgcaacctctgcctcccaggttcaagagattctcctgcctcagcctcccgagtagccaggactacaggcgtgcgccaccacacctggctaatgtttttgtattttttgatagagacggggtttcaccatgttgctcaggctggttgcgaactcctgacctcgaatgatcccccaccttggcctcccaaagtgctgggattacaggcatgagccgccacgcccggctaatttttggtatttgtagtagaaacggggtttcaccatgttagccaggctgggtgcgaactcctgacctcaggtagtccacccgccttggcctcccaaagtgctgggattacaggcgtgagccaccgcagtccggccctaatatagtttttaaattcattcattccaaggcttttgggaggcgctcagtggcgtgcagtttcctctcgaatttctttcttcccgcagtctttctgggcgggcgtctcccgtctgtttcttcccatcttcccccttatcatcctgggactggataattcttgaatagtctgggaggtagcagggaacccgagttcggagcctcgaccagaacctccagacgggaaattggagcaggtggtgtcgttccaggacgctgaggaccacctcctcccctaacgcacagcccaacgatcctaaaagtaaaaaccctgagtttctgagtcaagactgagctggtggggtggggaccgagtaggcgtggatggggagcccagcgggtccccagcggagaaaatgggtgagacgcctggggccgcggtctccagaattcgcctgggagggagagtggcgctacggcgccgccttcctggggagccgcttcgggctccggatgtccgctggggcccgacgcttgggtcccgacgcgcggttcgcactttccaggtttcttccccagggaacagagcttgagcggggggccacccccccgtcctaccggagttctgaggtgcggtcaggcgcggagagcggacgcccagcgccagattctgtgggctccggagttcaggcccactgagccgcagctgagcacaggcggggcaggaaaaaggatgaggtgagggaaggcgctgggttcctggaaccccaagggagcactgagctgagtacgtatcgcttgggatccaggtgtccttgttttaggatgtctgacaggtgtccccagggtatgagaagtgggactgggcaccccctatttgcttttttttttttttttgagacagaccacatgtttcctatcttggaaaatggtaccacttccttgtgcaagcctacccctgttccctcacccctcgttcagtccaacagcaaatctgtccagtcttctaactgtatctcaggttcattagccccgcttcctcgtccctgctcgtcttctgccggaccagtccgccatcttgtgaccggactcgggaatagcgtcctacttcccggcggcctccactcttgacccaaatgcaatgtgcagccatggcaatcttttataaacagaaatccgatcaagttactcctctgccgaaatccctctggtcagtggtttaactgtcgaggtgctcctggcagcactctgccctccccacatcattgctggtggacttgtctcccctactagactgtgccctgtgagggtggagactttgtgcagggttgtatccccaacatctgatgcagtgattcaataaacatctgtccaattaataggaaagacagttccttttctcattcccctattgctggtcccctgccctcaagcaggatgttatgccccagagtggctgtgggtgcgaacattctgcccctctggctggtctggcactgatttccaccctgagctggtgttgcctctctccttcctcttggccaacctctcttccaccaatataagcccaaactggaggccagcaggcagtcatgcgttttatggcaggccctgcagggagccagagtctgggtcccctgtgcttccacagcagcccccaagccctctacacggtcctcttaatagtgctggtcatgatgagcttggtgtttggtaagtggctccaagggttcagaagggtctcctggcctggatggagaaacccacagacaccaagtgtctgggtacacctgtccaggatgctcaggtaaacccatgcaggaggagagatgggacagatgggtttggtagggaatgcctgctcatggactgatgtgcaatctgaagatttttaaaaatttattattattattatttttgagatggagtctcgctctgtatcccaggccggagtgcagtggcgagatctcggctcactgcaacctccacctcccgggttcaagcgattctcatgcctcagcctcccgaataactgggattacaggcataagccaccaagcccagctaatttttgtaattttagtagagatggggtttcaccatgttggccaggctggtctcgaactcctgacctcaggtacctgcccgccttggcctcccaaagtgctgggattacaggcgtgagccaccgcacccagcctctgaaggagatttctagtgaccaccccagggctgtctcacttcacagcagtgacctgaatagagatactgaaggaatcctctctggatctgagggcaacatagaatagggagggttagggagtgtgctggatgagaaaaccagaatccacaggatagaacaagactgagtccagcctgctgggctccccacttggctgcaaagcaccagccacagagacacaggattcaaagtgttggtttagcactttcctctgcctaacaccaagtgctctgctgggtctggggatttgttaacatgtggtctggccttaggaccagaggaaaagggggatgtatgtgtatgcagttggggaaggaagcagagaattggggctttgatggttttctgagacaggaagggagggaggagtggggctgagtggcctggaatcaggcagtggtagggtgtgaggtagaatggggtgtgagtggggtcagcacttctctgtgttctaggtaagtttgttcctgtcaattgggaaccccctcaaccacttccattccccaaatacctgcgctgctaccgatgcctcttggagaccaaggagttagggtgccttctgggatctgacatctgcctcaccccagctggcagcagctgcatcactctccacaaaaagaacagtaagtggccttctcctgtcatgggcccagcactctcccaaacggaaactctctcagcctcctaagctgcaccccaagtcttgttcccataatcccataagacattgctccaatcctgtcttttttttttttgctgctctgtcacccaggctggagtgcagtggcgcaatcttggctcactgcaacctccacctccccagttcaagcaattcttgtgcctcagtctcccaagcagctgggattaaaggtgcacgccaccacgcccagctaattttttgtatttttagtagagatggggattcaccatgttggccaggctggtctcgaactcctgacctcaggtgatccacccaccttagcttcccagagtgctgggattacaggcgtgagcaccgtgcccagcctctcttcccttttcttcagagccacactctgtctccacttccactaaccttctctcctcaatctgtagctgaatagcttctaccctatcaaggtgcgcagctttgacggggaccctccagatctccaggtgcccttgcctgtcctcaagctgtctgcttccgcatctgtctgcagttactgctggtgttgctcttctcctgcatcctccacggcttcttcagtctccttcatggagcgttttctctctgacccttagtggttcatgttcaccaaggtttggtccttagctgtcttcccacttcatatactcaaaagcagaggattttatctgctttgctggcttcaaccagcagccacataccacttccttctgaatctgaatgttatgtcaaaccgctctcctcatatcccgttgaccactggacatctccctcgctgaaaattgactccttcccgatgcctgctcttccaccgaccccccacctttcttaagttagcaaaaacgtaacacataatatgtgctaggcactgttctaaacacttgcaatccgctgaggcaggtattattactatgtgcattttacagatgaggaaacaggtgcagaaaggtcataaccttgcctgagtctcacagatgctgagccagaatttgtgatggctccagagatggtgctctcaacaaccactgcatgcagctgcctgtgttcaagtcctcttactacccttttaacatagccgatgcacagatgtgggtcaaatatcagagtatacaataccatcaaaccaaagtctcccgctactaccctaacccacctggctcccctgcacatgtgaccactttttttactttctggatgatccctcctgcaatcttttatgcacattccaccctgcacaaatatgctgtttactattttttcacctcttcccccgccccaacccaagatagtagcatcccactgtaaacattattccacatttaagttaggggaactgaatgttccgatatcagtttgtaaacagcttccttgttttattgacctgctgtatactactccatagcatgcgcatatcacagctgatttccccatcccactattgatgggcattttggtcatttctctcaagcagggcagcagcaaacatccctgaacatgacttcttgggatgcaggcacaaagatttttctctattatgtataacagcagcagacatcatcttattctcttttggtctgaaaaataaataacaatacacctccttcctgccacccaatctccaaaacatttcccagctttttctcacatggtcctatggtgctagttctcctcacttggctcagtaactcccaactccccctccaaccattacatttcatatggctcttttcctccagccttgcatgggaacttcagtggagttccatggctggtgaacactgggcatgtccacccatgcctaactacaggaatcttttctttttcttttttttttgacttatgagtgtggggatgagaggatttggggctcttcctggggacttccgtatcactggtgcccactgtccctccccaggcagcggttctgacgtcatggtgagtgactgccgaagtaaggagcagatgagtgattgttcaaatacccgaacttctccggtgtctggcttctggatattctctcaatactgcttcctggatttctgcaatgaccctcaaaacagagggctctatactccttagtgtgactgcagcaaactttggtgtaaaattccaccagtttccagccaccttcctgacttctatctgggcttggccaggacttctagtccctcataccagccctccttgcctccctccagccactggaccccagccttggctcttcctcttggttgacgcccttcagcacacttactgctactctgtacccccagccctactgcccaccaggtttcctctcttgtcccctagtccctggatgtttctcccaaataaatttgtgtgtaaactgtttggtatgtctctttcttctggtggaggtgaaggctgagggaggtgcacctgcctaactgccctaccatgggtcaggtaagggacccccagctctgctgagctgtcctcttgtcctgccttggtatgtgatttgctctagacacaaaaagagaaagaggaaatgaaagccctcctatggcgaatgccagaaagttagtgggcatcctcggcagtgctgtcagaccagagctgtgtgggggctaggggcgtttagagggctatgttggtgggaagggggctgcgaaaggaccaggcccaggtagaaggaggtgggtgagaaggccactctttttttgagacagtctcactgtcacctaggctggagtgcagtcgtgtgatcttggctcattgcaacttctgcctcccaggttcaagtgattcttctgcctcagcctcccgagtagctgggattacaagcacatgccaccacacctggctaatttttatattttattagtagagacggggtttcaccagttggccaggctggtctcgaactcctgacttcaagtgatctgcctgcgttggcctcccaaagggctgggattacaggcgtgagtcaccccgagccgagaaggccactctcaaagagatgttagaccttattggagtcctggtctcttcaattctgggccaagttcttcagcctctgagggtgtcttccaggttgacctgctataaacctgggcctttctctgtcttatactgacgtcagaggtcatggagaagggtggacttagcaaggtgggggttggggggcacattaagggtttgtacctctctttgtacgccaactgcctcatgacttaattatcattggtttggtattttccgtcagagtacaggccacacagatttgttaacacgtgtgcaaaacactatataggtaaaagcagatgcgtacgatgccatttccatcaagcacagacagaactcatctaagctactaccagtcaggacagcggctaccccagagctgggaagagcacctgggagaggggaacagaggcaggcttggctgcgggtaaaggtcttcacgctgatttggtggctggttacacagatgtgtggtttacaaaaatccatcttgtgatatgtgcaagcttctgaatgttttaccaaaaaggtttgaaaataagtaaatcagccaggtgagcatggtggtgtgcaactgtagtcccagctacttggaggctgaggcagaagaatctcttgagcccaggagttcaaggccagcttgggcaacatagtaagaaccttagaaaaaaaagctgaacattgtgtatgcatttgactctagggcaaatatatttttttgagggggaaaaggccttaacttctacttgtgtatgcacatttacatgtgttttctcaatcatctgaggcactatccctacttgacaggtgaccaaggtggggctgaagagactgacatatccaagtggtagaggggctgggattggacctcccagccacaaagctgcactgcttttcagaaaaaggtttcataacccaagcactgggctgcaagacttggaagggcagacacctggctatactcatctgggagtcctgctgctcaataccaagcctgactcagagcagcgttatgtccagcatgtttatccagtgtatggaaaaggctgttgtatccatccttgctttctatacgtttgcactatttcaaaattaaaatattagcatgaagatccaaccactgcagcccaacatcagtgctctcagcactttgcccctcaaattgggcccctcgagagggcatcctggatgccagaatccttgaaaagaactaaggaatggcaggagtccagggccccagcagcaggtaactctggcatgtggctctgagttcctgagtctttctggtttaaagagaaagtttcttttttttttttttggagacagtctcggtctgtcacccaggctggagtacagtggcacgatctcggctcactgcaaactctgcctcccaggttcaagcgattctcctgcctcagcctcctgagtagctgggatcacagacacgtgccaccatgcccaactaatttttttttttttttttttagtagagatgggctttcaccatgttggtcaggctggtgtcgaactcctgacctcatgatccgcctgcttcggcctcccaaagtgctgggattacaggcaagccaccgcgcccaggcttttttttttttttttaagacagagtttcgctcttgttgccctgtctggagtgcaatggcgtgatctcagctcactgcaacctacacctccccggttcaagcaattctcctgcctcagcctcccaagtagctgggattacaagcatgagccaccatgcccagctaatttttcatatttagtagagacaagatttcaccatgttggtcaggctggtctcaaacccgacctcaggtgatccacccacctcggcctcccaaagttcagggattacaagcatgagccaccgcacctggcctaaagtttcttttcttaggtgaaaagacctggcatcatcagggtctaactttccaggttttgtagggtatgtttaaggctgggaagaatcacagtccccatgctttgatctccagctaagcagagggtggggagggatgtgtgccctttacaggaggccgagaggaagcgacaaacgccaagtgcaatggagagggctctgcaatcctatttggatcccaaacctcactaacccttttttttttttttttttttttgagacacagtttcactcttgttgcccaggctggagtgcaatggtgcaatctcggctcatcgccacctccaccttccaggttcaagtgattctccggcctcagcctcccgagtagctgtaattacaggtatgcgctaccaagcccggctaattttgtatttttagtagcgatggggtttctccatattggtcaggctggtctcaaactcccaatctcaggtgatccgcctgcctcagcctcccaaagtgctgggattacaggcgtgagccactgcgccaggcattaaacctctttaatctgtgtttacctgcccacacctgagcctgaccccacaaacaatgtgacacagttttagcccagtcccagtttattgtggaggaaaatgggggacatggagctgagcagaacagacccttccctctcctctcacaggcccctagggagatgggtgtcaggactcagtgaagtgaaatggggccgaggaagccagagactgacaagagagcaagagaggacaggaggcagaacaacactaggacaggcgggggttggtggagacagtgaggcagggacacaaaattgccaagtcaggacatctgcacagaattctattcctcatccttttttttggagacggagtctcactgtgtcacccaggctggagtgcagtggcgcgatctcggctcactgcaacctctgcctcccgggttcaagtgattctcctgtctcagcctcctgagtagctgggattacagaggtgtgccaccacacccagctgatttttctatttttaatagagagcgggttttaccatgttggccaggctggtctcaaactcccaatctcaagtgatccgcccacctcggcctcccaaagtgctgggattaccggcgtgagccaccatgcccggcctcctcgtccttcttgctgctagttcagtctggtactgggtcttagagacatggacaagacaggggaaacagagctagatgtcaataggcaggtgactggattgagagggatgggggatactggaacactcagatgatggggaaggaatggaggaaccactgtgcctttctcaggtcagcctgtctgggcagaatccacactagagattcttttctagggggaagaacagcaccagagctcagccaggcacagtggctcacacctgtaatcccggcactttgggaggtcgaggagggcagattacgaggtcaggagttcgagaccagcctgaccaacatggtgaaaccccgtctctactaaaaatacaaaaaattagccaggcgtggtggtgcacgcctgtagtcccagctactcgggaggctgaggcaggagaatcgctggaacccgggaggtggaggttgtagtgagcagagatcatgccactgcactccaccctgggtgacagagcaagactttgtctcaaacaaacaaaaaaacagcaccagagttcaagagagaaaattacacaaaagtcatatagatgctagtggtacaacagacggaggcctaagaaatcacagtgaccaaagaatgtgggtgttttcagagagggcagtgcaggatgctgagggtgttacagaaagatatttgcactgtggaattcaggaagggtgaggtgtcaagagtccagcctggggaagaaccaaaagtcctgaactattgaggaacaagtacatgcggcgcagctcagcaaaagacaagcccaggttcagggacagtgtgaccatggggtccaggccatcaggctccgtcccagcatggaaattggggaggggcagggagaggttcagggcctggtagaaccactgaatctgggagtcagacagaggcagggccaggggcctgtcatggggctccggcagagagctctggagttgggggcttgaccaggagttgcaataattgtactgacagcactgggcctgataccagtactctgcaaagtaggtgttgcgtttttcttggcagcggtaggaaatgtactgtccacagcctcgaacgatgaagcgaaccttgacatctgagggagaggggaaagctgataaccccttccaatagcttcccatagtccaagaacccctgctactgacttttcccatccttcacccagacctaatttacttctaacccagagtccttcaagaggctagaaaagtgagctctgctggccccctagaaccttagacccctccttccaagattcttctggttttttttgagacagggtctagctctgttacccaggctggagcatggtggcgcaatcttggctcactgcaacctatgcctcctgagtttaagagatctcccacctcagcctcccgagtagctgggactacaggtgcataccaccatgcctggctatttttttgtagagacagggtctcactatgttgcctaggctggtcttgaactctagagcttaagtgatccacctgcctcagcctcccaaagtgctagggttacaggcatgagccattgcactcagcccctcctctcttcttgtaccccatgcccggagcagccctgatctgtgagaggagagaagaccaagccattggctgccccaccagcagccccttcctgggaccttatttaccataatagatggtgatcaccatgcacagggatgagctgctgatggtacacttctctgagcctgaaatgcatcctacagaagggtcttctacgaggcagaagtggcacgtccggatgtcgggaacaggaactggggaggcagaaggagggatggaggcactgggtcactctcaaataccctgggccagtaggaagcccgattatccatggccacgctccacccccttcctggactcagttaccccttcctccctccctgcccctgggccccacttaccctttcctactgtgaagcccaccatgaccagcacacctacaagcatatggaccttcattttggaattctggggagatgggcagttcctgaggggatgccctgaaaccccaccttcctgtgaccatgctccttaatcctaagctgcagggtggttttgacaaggtctgagcaggagctgctgtaaatgcagagctatattcctacttggggcaggatcctggctgggaaggaagttattacttggcaggagggacagcatgtcctcacccacaacgtctggttcctgagtgtgggagtaatggcccagatggggtaatacctgggcactaccgggttctttatccagtgtctacctttgtcttgcataccctccaaagacctattccctcccttggaaagtccatgggttagtatctatctctgccaccatgtgctgtcttcgtcatacaacagggccaatccccactgtgctgggacaacctggccaggaaatcaagcatccccatccttctgagatgagcagtctcagctccaccagcggcaggcacacacacatcactgagcagcaattccggaccttgtcccacctcgttccaccctttagttagactgactttaggctacttttcctttagaactaaaactaaaagatggagctgctgattaagccccttacagtataaacagacagtcatagatatccaaacaaatatttctcatctttgaaatatgctttgtcttttccttttgaccttgcatttcatcacacgcagtcctaggaattctgttctgctccatactaaaaacaccacccaatccactgagcacaaatctgtcctggttttcaatctggggagggtgggctgggccatgagggcccctggagtccaacacaccatcaccttcccttccccaacagcaagcaccagcagactagctcatggccttttcttctactttatttcatattcccaccacaataacgactcctttaatttaaactaaaaaccatacagggttcctgaaagggtggcaaaaaagaaaggaaaagtcaaagactgcaggacaggtgggggagggaatcagcgaatcgtcttgactgggctcttgaagttgctggcggcttggagctgcagctggtaggccatcggatggatcttgaaaccgtagagcctaggccagggcagaggtcagagaggcagcagcatgagccccatccaggccctgccagtcacctgcattcccacctccccacctgagctcctctatggacctgctcagagctaaagcctcgtggttcccaacttctcagctcaagaacattctacaataaggtaactcaagcacagataatcaaataactttcccacagtcactcagcagggagatgccctgattctgggagaagcagacctcaagaaagggccatgccctgtcctcccctctctgggggatcttgggcctttcctttgacccttaatgactctccctgctccctacctgggcacaaactggttggcaggtctcttgggccggtactcgggatgcaccatgaagagcatgtgagggaaaccagtgccgaagtaggcgccatccgtgtgatggtgtcttgatgacttgggtgtgtacacatccatgcacttggggcagtagagcttcaccatggcttcacctgggatgtctgaaaggcctgggagacagccagactcagcaggccaggtatccccctattcctacctaacctcccctcaggactcaggctccaatgtgttgagccccaactccttcccataagactgccacacggtgctttcctttcccttcttcaacactcaccaatgggaagcattggctggttctcacagtacacacgaggacagtaaccaaagtctccttgctggtacttttccaactgaggtgaatacaatggaaggggttggcaggtagatgtaaagaagaggcaactcccttcgcagcccaacccataccactctgtcccccactcctcccacctctgtccagaggccccttctctggactagatgggctctcaaacttctgtgttgcctttcttccaattaggcaggctacaaaccatcagagccatttgttgtttgttccttgaggaagaggcagtctatcacaactctctgattcaaggtctgtctccctccctgaaaacaatcccttcaggatgacccccaatcagaattcaattcccaggcccaagttctggggttcttcccctcttctcagctagcttccttaaacagggcttaaacatgacttcttgctgcaggaacctgtgtctcttactgctcagaaggaggcaggtaggagcagagaggcctcaccatctgggcgatgccacggttggtaaggatgtagcgggcgtggatcaatccataaagcatctcggctgcctgctcaatcaggtcactctggttggggttgtcttccagttcttcatctgaaacacagcccggccaaatgcaactacttgtttttcagctttcctaggtgccctgcccatatccaggggctgcgggctattcagtttgcctagcacctacttttgggccttaccccatccaacatctgggcatgggacccagaaacctgggcttctgacccttgcatcaaacgaagacagctctgccttcccttcacaccttttcagcctctgctccttgctctccctcccaactccctcctcaatacataactgcaacaatgtcaatgcagaagatgaaactctagactggaaggtgcaaagcaggagaaacagacaacaaaccagacccatgaggaaacgcatgaggtctgaattgcggatttagaaaacatgagaacaagtgatatacgtcacaaaactagacaagagtcaggtggaggatcaaaataaagcatgaatttggggttaaagaaatcagagaaccaaaggaaatttcaaaattcaggcaagtgaatagagatttgaagagaaaaatagtgcacgcacacacacaaaacaaccctgagggtgcctcaccaggctccaggtccaagatcatgtctagagcttgtcggtagtgagggacctgctcattgagtccagtaagattaaatttgtcctggatgtagtcttcatccacctgtcaggacatggaagccaagagggaacccatatcaaaatcctcatctttgacctgggcaaaatgctctaagtgatgccttatcatcaacacaactgcatctgttgtgcttgtttctcactcccaactcagcagaagtacttgtgtctctccctagttcacctacactctctcccataaaagctttggcttttcttttctaaggataagtagatacagcaatctttttcttagacattcttttcaagatctttgtccctactccactcctgtatcccgtctctaggaaccagttttgtcctctcagctggctaaggaaggtggaagctgaacagcatggtttctgaacaaaacatttcaatgtgtagcatttcagttttcctaaaggccacctgagacaagtactagcagtgccactttagtaacaaaagatacaggccgggcgcaatggctcacgcctgtaatcccagcactttgggaggccgaggcaggcagatcacctgaggtctggagttcgagaccagcctggccaacatagtgaaaccctgtctctactaaaaatacaaaaattagccaggcatggtggcaggcacttgtaatcccagctacttgggaggctggagcaggagaatcgcttgaacctgggaggcagaggtggcagtaagccgagatcgcaccactaccctccagcctcggtgacagagtgagacccagtctcaaaaaaaagaaaaagacacaaattgactagcccaacgttatattgctggacggtggcagactcaggacttgggccccagttttgccactttagcacaggttcgtcggggtttataggggggactctttgctgataggaagttttcaaatagcatgtaagagaacagtgtagaagtggaatatgtgaaggaacgtctggtgggaagatatgtgaagctggcaagtagggaggttgaagagaactcacttcacagaagaattcattgccacggagcccacagaaccaggaaatccaggacacctcctctgagctgctcatcttcacgtcagctagaaaaagaacagtgtcagtaaagctcaagttctccttccctgcctctggtatcctccctcctcccacattcggccctccaaccacgggagaattcggaaccaccctttcttaaagcaacccaaactctgaagcactcctctccagctcctctaatttacatctcagccccttttctttgaagttaaacattctttggggtcccaccacttgaaagaagccaacagatactttgacccaccagcccgacccacatccctggagctcccgaaggccagggccctctctcctctgtgtcaactccggcagggacctcgactcaggctccctaccaatacaagtctctgcatgacccccacgcctttcccaagggtttccaagtttatcattctcaagcaagaaccgggctcctccttttctcacgggttgggggcgattgtcaggtccctttcaccggaatccacacatcccccctccgctcctcaggccacctctccctccttcgtgccggacctggtcgcttcctcccccgcccccacatcaaagtccggagaccccatgtgccgctcccagcgacaagggactcggagcagcgacgacttcagactcaccggctggacggggaccaggactggggtggggtagggaagttgctacttccagggaacggcggcgaccgctacagcgcaggccgcggacccgaccgcggcaggcgaagtggggtggggggagtggaaattagggagggtggggaagagggcaacacgcaagcgccaagggtcaggtgccgcggtggatgccgggacacggagtccccggtagagaaagaaactggctaaatgagagaaagcgaactaccaatcccaggatgacccgcgcacgacctggctgtcacgaaggcccggaggagggcgcttgcgggcggggcacaacgagaagccaccggaagcggaagccaggtatggcgttcggggcccgggagtctgggcaatacagttttgtgctcactgggtgaagaggctgacttagggcggggaaaggaggaagccaggctggatctctttccgcagctctcctcacgttcccctctagtcccggcgcggcgctgctgcccaggggactggcctatcctcggccaatccgctgggtccttattgcctgttgggcccctagtgcgaatcagtcccgccagagacccttgacgggcatactgtttcctccgggctcctgcctcatgaggggagaggtgcggcttggctccgtgcgtagggacttgggtggggtggggtgggcggtgtgagaactggaacgtcccagtgcgctaacctgaggtggtgccagccattctgctcgtccctttgcacttctccatttccccttaggctctaagtgtgaccttcgaaccctggtcagagtaatggtgaggggcaggcgtgacgttatttcattacacggcttctcggcattccacaggtttccctccgcctcctgagggcctttcctaacccacagagtggattcctggctccagaaaatgggcttggagcgggggccacgttgaggaaggcgaagggcattgtgggggcgttatgtaaaagtaggaccccaaccgacagatcctagtgctcgcgccacctgggcgcgcggagctttgctcgtttactattgaaaaagttccagcgcgggaaactgaacccggagctttgcgcacgcccgagccctcaagtaatgtgggttgtggtttttgttgttgttgtcgccacgcatgcgtcttcgtgccgtgtggctatttgattgtgtcaactcttctgattagaatggcgccattttgcggtacggaagctacacagcaacacgtataggagactctccccgagatcttctagggagtgacccatctatttttgtttgggaagaggaaactccgaaatgggatcgcggaagacttaaagggccaggctgatttttttttcctactggtatgtcttacggggtgggaaagtggtttcagaaagaggctggtgtttattgttggtgaggatgggggtgggggccggacgcaggacctctggacaacagtctcatggagttttattaatctttactaaggagcaaagtcggtattgtagggttccatgtttttacgcaaagtctctctcccttaggccctgcagagtcctaagttgtggggttactttagtggcaggaaagtgtttttgactactttttctcatcccagcaggtctctgaggctgtggttgctacagggtcaccacgagcttggcttacttgtctcatccttcccttgcctggtatcattttctcagttctcccaaaagccatgtcccggcccttgctcatcaccttcaccccagccactgaccccagcgacctctggaaggatgggcagcagcagccacagcccgagaagccagagtccaccctggatggggctgcagcccgagctttctatgaggccctgattggggatgagagcagcgctcctgactcccagagatctcagactgaacctgccagagaaagaaagagaaagaaaagaagaataatgaaggcaccagcagcagaagcagtggcagaaggagcatcaggaagacatggacaagggagatcccttgaggctgaggataagatgactcaccggatactgagggcagcccaggagggggacctgccagaacttaggagactgctggaaccgcatgaggcaggaggagctggggggaatatcaacgcccgggatgccttctggtggaccccactgatgtgtgctgctcgagcgggccagggggcagctgtgagctatctcctgggccgtggggctgcctgggtgggggtctgtgagctgagtggcagggatgcggctcagctcgctgaagaagctggcttccctgaggtagcccgcatggtcagggagagccatggagagacaaggagcccggaaaaccggtaaggggaaactttagctcagacccatgtctcattgtgttctgcctctcccagccacaccacaccagacgccccagcacagtgctgaagagttctttccttatcctcatgtgtaggttgacagggtagtatagtcaagtggttataaacatgagctccctggatttaaagcctgattccacttacttgggcaaacaacctaatgtctacatgttccagttttctcatcttagaaatgggggtagtaagaatcgttgttaggattcaatgggttaatatatgtaaaatgctagaatagtgcatgccgcatagtatgcaatacatgaatgttagctatagtcattatgactaatgtccctccccttgcccaagagtttgctaggtctggttaccatttttttctttcaactattctgctctggatcccacaatggtttaaagaaatttgtttttaagacaagtcaagtgcagtagtgagaaggaggggaaaagtggagtaaggagtttgatctgtaactgagtgaacaattaattcagataactcaccaccacctttggaccagcctggatccctcactgttaagtaggaaggaaggcaatttgtccctttttttttttttttttttttttttgagacaaagtctcactcatctcactctgtcgcccaggctggtgtgcaatggtgtgatttcagctcactgcaacctccgcttcctgggctcaagcatattttttgtagaaagcaggctttgccgggacatggtggcatgtgcctgtaatcccggctacttgggaggctgatgcaggagaatcgctaaggtggaagttgcagtgagccaggatcatggcactgcactccaacctgggcagcagagcaagactccatctcaaaaaaaaaaaaaaaaaaaagcaggcgttgccattttgcccaggctggtctcaaactcctgagctcaaagccatctgcccgcctctgcctcccaaagtgttgggattacaggcgtgagccactatgcctagctggcaatttgttccttagcagaaaagctgaaaagatcctattctaccctgccagccccctctgaggcctcaactcttccccttttccttcccctgcccttaatgctttttcttctttctctgcaggtctcctactccctccctccagtactgcgagaactgtgacacccacttccaagattccaaccaccgcacatccactgctcacctgctgtcactgtcgcagggtcctcagcctcccaaccttccacttggggtgcccatctccagcccgggcttcaaactgctgctgagggggggctgggagccaggaatggggctgggaccccggggtgagggccgtgccaatcccatccccactgtcctcaagagagaccaggaaggactaggctacagatcagcaccccagccccgagtgacacatttcccagcttgggatacccgagctgtggctgggagggagagaccccctcgggtggccacactgagctggagggaggagagaaggagggaggagaaagacagggcttgggagcgggatctaaggacttacatgaacctcgagttctgactttggtaaagtctgaccctagtctgctgctgaagtctgaacttgggcctctgacctgggccctttgacttccccttcctgggatctgcccagatgcagatcctgaagtttttggtcaataggctctgtcttcgtgagagacgggctgagagtcagaaataaatcaaccatttgtggtttattcacttttctggaagctattttgaggaagccaaacagaagcctgggagccacatgcaagtcccacctgagtcagaaggggcagcctctccaggtggcatgataaggtcacctccctgccaatctgggttcactttcaggtcccagaccctcctgggagtcccccacctattctttcaacccccctggaccaagaattgcccagcttcgtgcaagtctcacttcccccaggaggagttccctgactacagccaattcactgatttcacaaacataagtccatatactatgtgccaagaatacaggtaaagacattcccaaccctcaaagagttcacagctggagagggaaagtgccatgttatcaatttttttcttttttttttgagatgcagtttcgctctcattgcccaggctggagtgcaatggcatgatctcggctcaccacaacctctgccccccgagttcaagggattctcctgcctcagcctccccagtagctgggattacaggcatgccccaccacgcccagctaattttgtatttttagtagagacggggtttctccatgttggccaagctggtcttgaactcccgacctcaggtgatccgccggcctcggcttcccaaagtgctggggttgcaggcatgaaccaccactcccggcccatgttatcaaatattataatgcagggtgataagggaagtcaaggcctctagagatgagaatgggtagggttttgctggaagaggccagtgtgataggagggcccacgattatcaagcttgtacacttagttgaactgggaccagaactctagcccccaaatctaaactttaagtcaaacttctttgttccacccatttgtctacacttttctttcccacacttccccactctcccaccacccacccccttgtcttgctcatgccgggtggtaggcacaagaagagctcactgttgtgaaatccaggaattcaaatttgcagacgggcaggggagggctgttcaagtcgcaagactcctcattttttcttttctgggaaagcctttcatgaagtcttggatgcgaaatggaggagtggtgggggatgtggaaaagaacccaggggcagggggctgtagggggcgaccgagtttagggaagcatgagaaacccgggaaaatggggagctgggtttatattaaggtcctggtccttgctaatctcggtttggcggtccggcgcgcacagacagcgcggggtatacgggggcggtctattcgcagggtccgccccatgagctgcggcaccgcccccgcgggtccttccagtcctggtgcagctgcttccgggcttcgcggctcccggcggctccccaaggccgcggccccgacgctgggcccgggagcggtccccgcgcacagcgcccggacgcgtaggtcccgaagtaggcccgcgctttgcttcgtaactggggatctctgaggacatcttagttctgaccttgtggaggccgcgtctctgctgcgtgttcgcgggccagtcgggccactttgtagaaatcatagccctctaaatcaagggacgaacgctgctggctggagtttgctggacactttcattccacctcctaacaaagagaattcctattccttgaggtcccttggggcagcagttaaagactacacgatccaggagcacctaggacctggggccaccttcctgcccgctttattggatggagcactgcctccccagtttctgggacaccgtggggtgtggccttggtgagtgaaacttggggtgctgcctgctgggaaggaaatccggaaacgcagagaggactctctggtggtgacccaggccttgtcagatctgagattcttggaatctcagattgtgggggtgtggatggtgaatgaatttgggtatgcccccctttaccccagaactgaagaggaagcaaactacttgccacacttgaggctgcatgactattcagagaagggaggagccacttctgaattcagagtaggactgcatcaccaggcaaatacctgttctgagccagaaagactctggcttctgaggagatcctgagagtctgagtagtgccaggaagcagcctcagaatttgggggcccattacacaccccagccatgttcctgcgacggcttggtggctggctacctcgcccttggggccgccggaaaccaatgaggcctgacccgccttacccagaacccagacgggtggacagctcctcggagaattcaggaagtgactgggatagtgccccagaaaccatggaagatgtggggcatcccaagactaaggactcgggggcattgagggtttctagggctgcttccgaaccaagcaaggaggagccccaagttgagcagctagggagcaaaagaatggattccctcaagtgggaccagcctatctctagcactcaagagtctgggagactggaggctggaggggccagtcccaaactcagatgggatcatgtggattcaggtggcaccaggagaccaggggtgtcccctgaagggggactgagcgtccctgggccaggagccccattggagaaacctggtaggcgtgagaagctgttgggctggctgcggggggaaccaggagctccctcccggtacttggggggcccagaagagtgtctgcagatctccaccaacctgaccctgcatcttctggagctgctggcctctgccctgctggccctgtgctcacgaccactgcgggcagccttggacacactgggcctgcgtggaccgctgggcctctggctacatggcctactgtccttcctggctgccctgcatgggctccatgctgttctgagcctacttactgcccaccctttgcacttcgcctgcctctttggtctcctgcaggccttggtgctggctgtcagcctccgggagcccaatggggatgaggcggccactgactgggagagtgaggggttggagagggaaggtgaggagcagaggggagacccgggaaaggggctgtgaccgtggggtgggggcaaagggtgaagagagtgtgggctttaggagaaaagtgtgaggcatgacccaaattgtaagcatagggacctcagggatggggaagaaacccgagtacgagggtgcagggccccccttcatacacaggagagaacagaactatttagggtgtttgtgtttatggacagtgagggcactgctcttggattcaccagctgttatttttgcttttacttttctcccaccttcagtttttttttttttttccacctccactttttaaaagcaaaaaaaaaaaaaagtatgatggtggtgaataaagaccaaagggtcctctctacctttgaaaactctcctggggtggaggagaccagggcaggatagacagacctctgcagtaagagagtggttgggaaacccagggtgttccttggatctcaggatctgagccatcgagggaagagtggggctgctaggcaagtggattagggggtctggatagggccccacaggtgacagggagcctgcagggcggatctggtgatcatgggagccagagggagtggggacagtgcaggcagtattggcaggagggccagtgcagaagggctggtagctcaggcagtgtgggggaagcactgaagcctgtagtccccacttgggggctaggggtttgctcactcagcaataaataactgtgtcacatcaaatcctaaatataccactacaaagtgagagttactgccactctgttcttactgacaccgtccagctgggagtttaggtggtagaggatccagggggaatgttgaaatgggaggagtgggaatgacgtctggagacaaaccccagaatgagatgaggattgaaaaattatctttattatcttgagtgggagctggagctggaagtctccagcttctccctccaacaactcagctcccattgtacccatctggggacttagatgaagttacaggtcagttattggacagctcacaggcctctgtgatggggggagggaaaaagaaggacagaagggaagtccagggagaaaagcaaagttgatagtaatggggtgggggagaacgtgttctttcattccctgtgtcaaaggggagtctctaaggctcttttccctccacgtatgaccctctgccccctttatccagtgcaaactcagaaacctctcttttgagtagcccagaacccatcctgcctccctcaggtgacatcacagctcttagccacatccctctggtgacatcacacgagcctctttcaccctgtaacaccagaagactttgtgagtcctaatcctgttttatgagattttaacaccttaccttgattcctaggagtcaataagaaggctttggagtccaggcaggaagtcagggacttgaattcctccacacacttttcgggaggatgtggtgagcgatctggaagggcaaggtggggtcaggccagtcaaaacccctggaagcacctagctcttcctgggagggtgtcataggacccagagtgaggagttctcctgccctcccttgtttccctccaacccttcctgccttgtatccctactcactgtagaggagaaagcgctggtaaccctggcctgtctcattcagcatgattccacctgggcatgagctggaaaagagctcagtcttcatgtcagggcggcctgtcaaggcaggtgggagaagtatgagaacagagatgcagaaccaaactcaagggagggtgagggctgggaagaaccaaccttcagttctgagatctgtgctcccttcagtcaggtggtagatccatttccggggcacacagagcccatctttcctgcagaggtggtggtggcaaggaggaaagaatgagcatcaccccaaccatagtgtcccagcttcttttttttttttttgagacagagtctcactctgttgcccaggctggagtgcagtggcgccatctcggctcactgcaagctctgcctcccgggttcacgccattctcctgcctcaacctcgtgagtagctgggactacaggtgcccaccaccatgcccagctagttttttatatttttagtagagacggggtttcactgtgttagccaggatggtctcgatctcctgacctcgtgatctgtccgcctcagcctcccaaagtgctgggattacaggcgtgagccaccacgtctggcctgtcccggcttctatttactccattgtatttgttattgaagcccagctctccttgggtttcaagctaccaagcattggttaggcacatctttctccagagggcaattaatacagccactgaattccgtgggccaagcatagtagatataccagctaagaggccagctcttggtgggtggattctcacactttgggcagagactgaacccagtgatgcttctgcctccttaccactcacatgcggatggtagcacgaaggtggagctgcatcggggcagagccagcagccatattgaagacaatgttgtccacagggtcaaaagttgccaactcctccttggtgggagctgcccctgcgataaagtaccactggcccaagtggacctctgggaactggagagacaatgaagggagcaaaagagggtgggttccagcacaggatgggttcaacctcttcatcagtcaaaacagcaagatttaggggtagaggtgttggctgccttcctctttccaactggggattggatccatgacaaagagtcattaaatgacttttcctctttgcccctccccagtcaacctgggtaaccaccccaccccccaattctgccatgcctctgcattgatggccacagtactgatatttttcttcttgctttcattatcacaacactcacacccccttcctctcttcctttcccaagatggtctccagtcatcctaggccatccacccaagtccctcagagcctccaccataggcttcccctaatctcagtccatacctccttcccatccacgcccagagttgtcagttgactgtgctcagggcactggtagatggagttaaggataataccatagaagtagagcagagctgcccaaatttggtggaacatcttcaggcaggagggagctggtgctctgtgtgccttaactgctctctcccctactggctgctcagtccactctgctttcagctcccttgcgttcgacccttgaccctttcacctgctaatgagtaacttcaaccttgttttccaacccaaacctggattacttagtgtttgggacttcctccccctcttccggatgcaaccactccatagtacaccctggcatgtccagggtttctcaggagttatgaggagagctgagctgtccagggagaagcctgtggtctttgaacctgtatctgagctggttatttgttgcactgtgcagcactgaagggaagtagcttgactgggcctctcattcattcacttagcaaactgttttgaatcccaagtcccagttgtttcccaagaactagctaatccccggggacataaaaaaacgaataagacatagcccctgatcttgaagaagtcgttagagggaaaactagctgtgtagacaaaccattgcaatacaacttggtaaatgctttagaacaggtatgatgcaggtgctggggcacggtggattgctctctttagtttacaattagaaaaatatgtataccctggcagtgttcactgacacattcactcaacatttattactacaaagaggctatgtaatctggctgttagagaggatagatgttggtgtcaggcagaatgtgtccaaaccctaactacaggcagggcaggtagctcatgcctgtaatctcagcactttgagaggccaaggtgggcggatggcttgagcccaggagttcaaaaccagcctgggctacatggcaaaactctgtctctacaaaaagtacaaaaattagccgatgtggtggcacacgcctgtagtcccagctactagggaggctgaggagggaggattgcttgagcctgggatgtcgaggctgcaatgagccctgattgtgccactgcactccagcttgggcgacagagactctgtctccaaacaaacaaaacaccaccaacccctaactgctatgtctgttttttcatctgtaaaattggcaaatcatcaatcttataggattaaatgaaataatgcacataaagcccttagcaaagacttgcacatggtaagtccaaagtatatatttgctataattaatagtaatgtttgcaaagcacttagtttctggtgggtaataagttctcaaataataggcagtaagaattgccaaataggttgtccttggatagcaccaagtgactggagcagttaatgctgtgagagatggatcttcctcgatagattatttatttacttatttatttttaagacagggtctcactctgtcgcccaggcatgactttgacttccccggctcagatgattcccgagtaggaggtataggtgcacgccatcacgcctagctaattttttgtagacacggagtttcaccatgttgccccaggctggtattaaactcctgagctcaagcagtcggcccaccttagcctcctaaagtgttgggattacaggcatgagccaccacacctagcttgataaatttatatcccatggactgccacaaaaaatttgccgagggctgaggcttgcgatttagttaaaaaacaaacaaaatttgggtgaccagtatattagagtttattaatactgttctattttggtgtaatgtttgcattttttttttttttttttgagatgggagtctcgttctgttgcccaagctggagtgcagtggcgcgatcttggctcactgcaatctccacctcccgggttcaaagcaattctctgcctcagcctcccaagtagctgggattacaggcgcccgccaccacgccaggctaatttttgtatttttagtagagatggggtttcaccattttggccaggctggtcttgaactcctgacctcgtgatccacccgcctcatcctcccaagtgtgagtcactgcgcccggccgaaaatttttgtaataaaaagctaaaatgtggttaggcacagtagctcacacctataatcccagcactttgggaggccaagtctgcaagaccaggctgggcaacatagcaagaccccatctctataaaaataaaattagccaggtgtggtggtgtgcatctgtggtccctactagggaggctgaggtgggaagatcggttgggctcgggaggcagaggctacagtgagttgtgattgcgccactgcactccagcctgggcgacaaagcgagaccctctctcaaaaaaataagctaaaatgttaacagctttttattggggcagtaaagtacaagtgctcgatctggagtcctgtaggcctggatttgtcaattctgacacttatgttcgtctaagtgtactcacttaaaaaatgttaaaagctcgttaaaaggctttttaaaataatacacaaaacccgtagtatatgggctggcacaagtgctcattaaacagctgcttattagaactcttaactaaaatataaccaggacctgggtataaactacgaatcccagaaaggttggacaccccaacagcgatgtgtctttctggaggactcgcagtttcgcggggccgaggcccttggcccagggcaggttaagagaagagggcacggagaggaggtaatgcctccacccccggccttcggaagcacgctggccggcctttaaattccccacggtcagggtcttgtctttctgtccactcggactccatttgctcccaattctcaaactcggaagcgcctcttttcttgacaagtcgtgcaacttagtagcacgtttacttttcctaaaacgtgtcatgtccccttggccacacaccgacgaatgtgacgcccacagcccttaaaacgcccacccggcagaaccgaaatctagcccaaccaagcaaccgagaacaaaattgaccagtgccgcccccaaacgcctactgaaagagtaacttccggaggcacagaagaaagggcgcagcgagggcaatagggtggagaagagttttagctggctaggacagtgccgcctgaaattatcagcctgccaagatttaaacatagatgaatgtggcataatcccccatctccaaagtccaaggtccatacgaccgtccatagcccctctcgaggcagtggtagagtcccagctggtgactgtttttcaggcatttacggtagccacctcaatcttctagcgctcaagcgcgcgcacagacgtgaacgccgccagaggggggagggggtggggcgatgcttaagtgtccacgcatccgtagtgcgacgcacgcaggcgtagtacggtcccccgggcgacagcggtggcggctcctcggggtgctcggctccctcccacctaggccggccccggcccgactcgccctcagaaactcactgtttggggctgcggactttctcgtcgtgccccacaaaagtaaagcttggggacctggggggagccggaagtatcgcttcgagatccccaaatactatcggggaaacggaagtggccgtcggtggcaggtttgggggagaccggaagtgacggtccgtggggaagtcgggggcggagccgcggggtggtgggtgtgtgtgtgtgtgtgtgtgtgtgtgtgtgtgtgtttggctgtgggttagttgtgccgttctgctggaacaccgtgggaaggcagtagacgcgggcagtcagctagcaggtccgtcgccccgtgagtgccgtttcgggtctatagtgagttaggagggttcgatgggcgtggcgcgcgtgcgcgaaaccactttctccgcagagtgtggggcgaccaccgctttcgcgttgtcccaggattttccgacctctggggcgcttgtcctgccgtgaccggtgatgacactagtctctggtctcgtgcttccttcctaatctgactggctccctgcttattgtgattggcgtcgtggagcccctcccacctctcgtcctccagctccctaagccgtcgatctcctgccctttgtgtttctctccctgtgccccggaatcagaagggggatggggacaggtgtgaatgtgtgtgtgtgcaggagaaactttttaggtattggggcagggattaatgctagggagtctttcgggtacactctggtctgggcaacagcgggccttccttccttcgttcttctttagagacctgtcggccatggagcctaatgatagtaccagtaccgctgtggaggagcctgacagcttggaggtgttggtgaagaccttggactctcaaactcgtacctttattgtgggggcccaggtgagacacctcactagttctggaagacacctttagcttttcctcgtttaggccccttagcctgagagatgagcttgattttctggtcaccagattttctttttttttcttttttttgagatggagtcacgccctgtcttccaggctggagtgcagtggcgcgatctcgactcactgaaacttccacctcttgggttcaagcgattttcctatctcagcctcctgagtagctgggattataggcgtgtgccactatacccagctgatttttgtatttttagtagagacggggtttcaccatgttggtcaggctggtctcgaactccttacctcaggtgatgtgccctcctcggcctcccaaagtgctggtattacaggcatgagccaccgcacctggcctcagattttctttttattgatccctttgttcgtattccagtagaacgttttctgatgttttgtgagtgaggctgattttgttctgtcctccacatggatagaacttaatgcagagggaaatacagaggaaggaagaatctgtgtgtcatcatcatgggtggaccccaacccaaagggacaggcatggctctggcctttgggaagggaaacagcacaggaaccctaagcaagtgtgtcttactgatagacattggtcaggtctatgctgtgtttttaaagggtagaaatcagaacccataatggagataggtccttgatagactgttgagtgaaattactaatttttatggcatagcttgagtctcttgagcttaaagccttggacatagctatctgtgtctttactcctgtaatacttggagacaaattgcatgtggggtggtccatggttttctaaaatgtgatactacctggatataagaaagccatatatagacttgtgattagatgtatataaatactctggtacttcccaagagtcagtttgtagttaggaaaaatatttctctttttgcttttttttttttttttgagatggagttttgctcttgttgcccaggatggagggctggggcgcaatctcagctcactgcaacctctgcctcctgggttcaagcaattttcctgcctcagcctcctgagtatctgggattacagacgacgcctactaccacgcccggctaatttttgtatttttagtagagacagggttttaccgtgttggccaggctggtcttgaactcctgacctcaggtgatccacctgcctcggcctcccaaagtgctgggattacaggtgtgagccactgtgctgggaccttttttgctttcttatcttcttagtctttcttcagtaacctgataccagaccccatcttctttgccattttttaatcttggaaatcacaggagagtctggtaaataaactggtatcatcttgtgtttggaaaggggtcactgatgtctctagacacatactcccttggatgccagacagataatataatgtccatgtggtttttttttgtttttcatccgtgttatttttcctggatctataacctgagcttcattaagtttatttatttaattttttgagatggagtccctctctgtcacccaggctagagtgtagtgatgcgatctcggctcactgcaacctccgcctcccgaattcaagtgattctcttgcttcagcctccctagtagctgggattacaggcgaccaccatgcctggcttatttttttgtatttttggtaaaaaaggggttttaccatgttggccaggctggtctcgaactcctgacctaatgtgatctgcctgccttggcctcccaaagtgctgggattacaggtgtgagccaccgcgccaagccaaatttattgtctgtattttgacagctgttactttagtttaagggtttgcacagtaatgatctcacggtcaagacaaacgggtagtgattctgtggtggtttttacccctcacctccacaactcggttgtctgtctttgttcttcctctttcctccattctttccattcctgtgcatgcctcttcttttcagatgaatgtaaaagagtttaaggagcacattgctgcctctgtcagcatcccatctgaaaaacaacggctcatttaccagggacgagttctgcaagatgataagaagcttcaggaatacagtaagggggctggggaggcagttcagaggttggggctactgtctggagggatgaactgaggccatgggtttacctgttcatactatgttttggtgtgtgtctatttttctgcagatgttgggggaaaggttatccacctggtggaacgggctcctcctcagactcacctcccttctggggcatcttctgggacggggtctgcctcagccactcatggtgggggatccccccctggtactcgggggcctggggcctctgttcatgaccggaatgccaacagctatgtcatggttggaaccttcaatcttcctgtaagcttatgttccacaggggagggcttttgtgggtagctttggttgtggtagcaccagggaattaataagatagatgcttccatctttagattgggttcagggggccctgtggtgtgctattggtctcagtctttaaggagaaaaggaggtagggctccagggaatgaattggaggtgtggaggccttagtgttggcttctcccagaacaacttcccttaccctttccccagagtgacggctctgctgtggatgttcacatcaacatggaacaggccccgattcaggtattgaggggcctccgagggtcagggaaggggatctgggagaaggaggctgggaggtggggtggacctggctgagagatggctgggacctgatttagtaggtggtagaactcatggcttcatctgtaacctaccctgataaaccttctctcattgtagagtgagccccgggtacggctggtgatggctcagcacatgatcagggatatacagaccttactatcccggatggaggtaagtgggcaaggctggctagggtctctctccaccctccctctcccttttctctcagcctgggagttagggcttcactggccacattcacagggtttggccttcataatctagtcttctctgcagtattcattcttttgggcagaaaaagtatctttgtgaggctctctcatttctgccaatcctcttggtgcctggtatctggggagtttgtttcagacttagtctcatggcatctcttttcaattaaaggattctactctcttaacttgtggaggctgggaaaccaacttgtggaggaaaggaaaccacaatctctactctttgttagaaatttatttacaaatattacagatgctgtggccgggtgtggtggctcctgcctgtaatcccagcactttgggtcgccatggcagggggataacgtgtggtcaggagttccaatccagcctggccaacatggtgaaaccctgtctctactacaagtacaaaaattagttgggtgtggtggcacgcgcctgtaggcctggctacttagaaggctgaggcaagagaatttcttgaacctgggaggcggaggttacagtgagctgagatcatgccactgcactccagcctgggcaacagagcgagactctgtctcaaaaaaaaaaaaaaaaattacagatgcttattatgcatctaatttgtgtcagtcttatgctagttgctagcgagtcggagataaaattgcagagccatgccttcagggagtctagttaggatactttctctgttcagtctcctgtagagtaatcctctgcagcagtcttaccctgcctttggtatcctgactctcccctaccttcagtgtcgaggagggccccaaccgcagcacagtcagccgcccccgcagccaccggctgtgaccccggagccagtagccttgagctctcaaacatcagaaccagttgaaagtgaagcacctccccgggagcccatggaggcagaagaagtggaggagcgtgccccagcccagaacccggagctcactcctggcccagccccagcgggcccaacacctgccccggaaacaaatgcacccaagtgagagatggagggaatctttagtgggtggggaatcctaagtgaagtatggggagaaggaaatgaaccatggcaagggagggaaaggattacttggaggtcttagttgaagggttagcattgaggggcgaggaggggctctctcggtataggtaaatgacgctaggacaggcagctgagaagaactgctgctctccctatggcaaggaaatccaaatggtatctcctgagcctgatcggaattctcctctgagttcacgaaggcctgctctctttcttagaattagtctttcaccattgtaggtgcaggattgtggtggggagggtgggagcagttcattttcttctccctatcctctcatgggtgggagtaaagaatagaagctttggctgggtgcagtggctcatgcctgtaatctcagcactttgggaggcagaggcgggcagatcacctgaggtcaggagttcgagaccagcctggccaacatggtgaaaccctgtctctactaaaaaatacaggccgggcacagtggctcacgcctgtaatcccagcactttgggaggccgaggcgggtggatcatgaggtcaagagatcgagactatcctggctaacatgatgaaaccccgtctctactaaaaatacaaaaaattagctgggcatggtggcgggcacctgtagtcccagctactcgggaggctgagtcaggagaatggtgtgaacccaggagacggagcttgcagtgagctgaggtcgcaccactgcactccagcctgggtgatagagcgagactctgtctcaaaaaaaaaaaaaaaaaaaaaaaacaaaaattagccgggtgtggtggcaggcaacttaatcccagctacttgggaggcagaggcaggagaatcgtttgaacctgggaggcggaggttgaagagaatagaagctctgctggtccagagaaggattgggccagggctctgggagaccagggagaaagagggcacatgtggtccctgttgactgtgagggtgggaatctgaggaaggctttggctcattgccccttgggtttgtccacagccatccttcccctgcggagtatgtcgaggtgctccaggagctacagcggctggagagtcgcctccagcccttcttgcagcgctactacgaggttctgggtgctgctgccaccacggactacaataacaatgtgagccctttgatggccctgccctttctcctcagccccagtactcccaaaacagaacaggctgaaatgcagataactctttccctccctggaaaaacattgcaacagggccaggtgcagtggctcacgcctgtaatcccagcactttgggaggccaaggtgggcggatcatctgagattgggagtttgagaccagcctggccaacatggtgcaaccccatctctactgaaaatataaacattagctggatgtagtggtgcacacctgtaatcccagctactcaggaggctgaggcaggagaatcgctagaactcgggaggagggggttgcagtgagccgagattgcactactgcactctagcctgggtgacagagcgagactgtctcaaaaaacaaaacaaaacaaaaaaacacacattgcaacaaaacaatttctctctaaacctgtaagtgattttgtcctcccttacagagaaggtgataatctttgctgtaagcactgtcctcgtatcgtaccccttgtgcccctgaatgaatttagaaaatgtaaagtacaggagatcagtatatgatgacttactgattcatagtagtgttttaataggatgttccttatgtgaataagatataatttatttgcaaagatttggtctacatgtaaacttccaaggatataactgaaagttttggaggacatggtattctcagtaggcattattgcttttattagtgagatggactccagcttgatattttctgcctttttgtgtttggctggttgtgcgcagcacgagggccgggaggaggatcagcggttgatcaacttggtaggggagagcctgcgactgctgggcaacacctttgttgcactgtctgacctgcgctgcaatctggcctgcacgcccccacgacacctgcatgtggtccggcctatgtctcactacaccacccccatggtgctccagcaggcagccattcccatacaggtgggttagggggagtctggcctgagggagagtgaggggtgttgatagagtgacccagggtagctactgggcctgaaggaggttaggaaaggaggagactggaaacatggtgatgaaggctggagatactttagaggtttatcatgaggttttcttggttaggctcttgtatttttctcacatctgcctgtccatctgtctttttcagatcaatgtgggaaccactgtgaccatgacaggaaatgggactcggccccccccaactcccaatgcagaggcacctccccctggtcctgggcaggcctcatccgtggctccgtcttctaccaatgtcgagtcctcagctgagggggctcccccgccaggtccagctcccccgccagccaccagccacccgagggtcatccggatttcccaccagagtgtggaacccgtggtcatgatgcacatgaacattcaaggtgagaatagttgctggcgagaagagcaggatcagcatgatgagggaggttcatgctgaggtgtgagggaacagggtggggaagggagaggcacatgctggtggtggtagcctggggaccagagcagaagcttaagtagacagatgtggggggtgtgggggttggtttgtctttggaggtgtgtttgtgtggtgaagggagtacctctccctgtttagatggagggaaaggcaggctttctgattgggggattatgggcctgaagtatgcctgatctcagaaggatatagttaggccttggccctacctacctcagggccactgtctctgtctccctgcccagattctggcacacagcctggtggtgttccgagtgctcccactggccccctgggaccccctggtcatggccaaaccctgggtaagagtgagggcatcagggcaggctgagctctgggtagagaaagggaagggctgagtgggtgggttgaaggggtccaggttcaaggttacatcagacccgccccccaggctccaccctcatccagctgccctccctgccccctgagttcatgcacgccgtcgcccaccagatcactcatcaggccatggtggcagctgttgcctccgcggccgcaggtaatgacctggaaggggaggcttgggaggtagggcacagtccatggtggcagctggctggcaagggcctggccctcagccctcttcggtctgtctcttctgccacccacaggacagcaggtgccaggcttcccaacagctccaacccgggtggtgattgcccggcccactcctccacaggctcggccttcccatcctggagggcccccagtctctgggacactggtgagcaagggtcggggagttctagtgcgtaacagtctagggagagactcctgtggtggtgcatggaagggcaggtctgaaattctcccttgctctctatccagcagggcgccggtctgggtaccaatgcctcgttggcccagatggtgagcggccttgtggggcagcttcttatgcagccagtccttgtgggtgagttttcattcttccccactcagagtttaaactcctttcctagtctgctcactggcactttccagttctttccatattttcttggttcctgctttcctggaatggggctgctgtagtgtcttgtgtcttcaggtttcagcttttttttttttttttttttttttttttgagatggagtctcactctgttgctaggctggagtgcagtgtacaatcttggctcactgcaacctctgcctcccgggttcaagtgattctcctgcctcagcctcctgagtagctgggactacaggtgcacgccaccacgcccagctaattttttatgtttttagtagagaagggggtttcaccatgttggccaggatggtctcgaactcttgaccttgtgatccacccaccttggcctcccaaagtgctgggattacaggcttgagccatcgtgcccggccagcttttttcttttttttttaagttacagagtcttgctctgtcacccagactggagtgcaatggtgcaatccagtgagttaaagctcactgtaaccttgaactcctgggctcaaacagttctcccacctcagcctcctgagtagctagcagtactagctcctggctagtaattgtctttttttttttctggtagagatggggtcttgctatgtggcctagactcctgggctcaagcagttctcatgccttggcctcccaaagttgctaggattacagccaagagccaccatgctcagcccagctttctttttttggtttcttacagctcaggggaccccaggtatggctccaccgccagcccctgccactgcttctgccagtgctggcaccaccaacacagctaccacagctggccccgctcctggggggcctgcccagcctccacccacccctcaaccctccatggctgatcttcagttctctcagcttctggggaacctgctagggcctgcagggccaggggctggagggtctggtgtggcttctcccaccatcactgtggcgatgcctggtgtccctgcctttctccaaggcatgactgacttcttgcaggtgagtggctggcttgccattcacctcatcttcctgtcccccggcccagccaggcagtggtaccttcttgccattatataaccactgggtaagagcccctagtgacatgttaggggaaggggccctgggaattcattgactctgaacctttcattttaaagatgaagaaaatgaggtttagaaaaagaaagtatagtaattagtgtcactgctttctgacagcctgttcagaggaagaggtaggtaagttgtgctgcctgactctgttaaatacctaccatacttctgctttaagcagtgaagatcagaatgtaactccccatcttcccagacccgttggtttgtgccctcttgatgccgtattatttccgtgtgtcttcattctcacctcactttctgttctttgttctttctttatttgccaggcaacacagacagcccctccaccacccccacctcctccacccccaccacctgccccagagcagcagaccatgcccccaccaggctccccttctggtggcgcagggagtcctggaggcctgggtcttgagagcctgtcaccggagttttttacctcagtggtgcagggtgtgctcagctccctgctgggctccctgggggctcgggctggcagcagtgaaagtattgctgccttcatacaacgcctcagtggatccagcaacatctttgagcctggagctgatggggcccttggtgagcaaaaaggatgctttggcttgctccaggaaggggcagccagaggaatgtagatggccttggtttaggggtgttgccaaggtgggatgaggttgatgatctggttgtgggtgggcaggccaggtggtaaaggccattgctaacatctgcccttgtcccccaggattctttggggccttgctttctcttctgtgccagaacttctctatggtggacgtagtgatgcttctccatgggcatttccagccactacaacggctccagccccagctgcgatccttcttccaccagcactacctgggtggtcaggagcccacacccagtaacatccgggtaaatgaaggccaggggccccagaactctcctcttttgcacattttattccttatttctgactgcttctctgccaggtaaagctccaattgcccccacacaagccctggacttgttggggtcgaggtggaagtcttgggaggactgaggctttgaactaaacctgttctgtttcctccacagatggcaacccacacattgatcacggggctagaagagtatgtgcgggagagttttgtgagtaacccttctctattcctttcctctcctgggtctggtcaaggcagctgcctcctccactcccagtcttatgattcttgattttgggatctttgtgttatcttgtctctcagtccttggtgcaggttcagccaggtgtggacatcatccggacaaacctggaatttctccaagagcagtttaatagcattgctgcgcatgtgctgcattgcacaggtcaggggctggccaggcgggggcaagtggggcctgttgcatgtgcagggctgccacgtgccagcattccctccttgtattttgcccacagatagtggatttggggcccggttgctggagttgtgtaaccaaggcctgtttgaatgcctggccctaaacctgcactgcttggggggacagcagatggagcttgctgctgttatcaatggccgaattgtaagcaccacctagccccagatccttagccttttgtttcctgaggtttccattctctgcagttttcatttttcttttctaaactgacattctgtaacctggatctaatctatttctaaaggtggttgagggttttgtgttctaaatctgctttctgtccctcagcgtcgtatgtctcgtggggtgaatccctccttggtgagctggctgaccactatgatgggactgaggcttcaggtggtactggagcacatgcctgtaggccctgatgccattctcagatacgttcgcagggttggtgatcccccccaggtaagggacctgttgggcgatggggtcagggtacttgagagaactggagagatctgagaggaagtatggtgttctttaatttcacagccacttcctgaggagccaatggaagttcagggagcagaaagagcttcccctgagcctcaggtactctagagagggggaggttgaggggccagataatgtggagtggagggctgggggagaaaggtttggaggctaaaaattctgaagcctggctcttcccgccatctgacacccagcgggagaatgcttccccagcccctggaacaacagcagaagaggccatgtcccgaggtccacctcctgctcctgaggggggctcccgggatgaacaggatggagcttcagctgagacagaaccttgggcagctgcagtccccccagtaagtgtcaggaagtaatccagtgggtcatggcagctgaaagtcaaggacattactattttctcttttcctccccaggaatgggtccctattatccagcaggacattcagagccagcggaaggtgaaaccgcagccccctctgagtgatgcctacctcagtggtatgcctgccaagagacgcaaggttggttttcctcttccctaagcctctctctctatccaggtttccccgtcatgcctggaatcaaactatgtagagatggtgggagctcttgttattcagtctcccctcccctcgtttaatgaggaaactttttctgggattcagacttgctcttggttgttgcataaccatacaggacttgaccttagtctgtttgctagcagtcctgtattagttgctcagctgcctaatccccatgtgcttagatcccattttcctttaaggtgggtttcctcttgtggattacctagctctgaatcccggatggcttgaccccttctgcctttcgttttgaagagcacgttcaagcacattcactttagttttggctagtgccaaagagaattaggaaggcatttctgctgtaaaaaccacatcctggactcttaatttcccctctctccactagcatggagactcagtggagtggttgactcatggaaagggtgagccggatggtggcactggatctgacgttgatcctcttttccctcccaaccccctgtcccccagacgatgcagggtgagggcccccagctgcttctctcagaggctgtgagccgggcagctaaggcagccggagctcggcccctgacgagccccgagagcctgagccgggacctggaggcaccagaggttcaggagagctacaggcagcaggtgccaccttgaagcagaatagggatggtctagtgggaggggttgggctagggtccctcttccctggatcccttcagcgatgaactggtcagcctggtgctaccatttgttttcccctttggcatctgggaaggcttgacagtgccaccccgggctatttgacagtgtgcttggggggggaaatgttagcttctgagggatggccttgtgtgcttgctgggatcatggggacttggccagcgtttctccaacctgcttactttttctctttagctccggtctgatatacaaaaacgactgcaggaagaccccaactacagtccccagcgcttccccaatgcccagcgggcctttgctgatgatccttagctctttgctctatggcccttcctcatcaggggaccgtttcccccctcttccttcacagtatttaagaaataaaagtcggatttttctggctgctttctctctacattgtctccattaggtagtgtgtcccttaatcttgtgtgaacttttttaaattaatacttccttggaacactgttgtgttctactcagcacgctaaattgtacaagccagttttgatgtttgtttttttttttttttgagacagagtattgctgtctcccaggctggagtgcagtggcccgatctcgagctcggctcactacaacctccacctcccgggttcaagtgattctcactcatgcctcagcctcctgagtagctgggactacaggcgtccgccacgacgcccggctaatttttgtatttttagtagagacagggtttcaccatattggccaggctggtctcgaactcctgaccttgtgatccacccgccttggcctcccaaagtgctggaattacaggcgtgggccaccgcgcccagcctgatgtttgtattttttgtgcgaaagcactttatatataaataaaaaacctgtattttgagttgggagcatattccaggtgcacactagcatagagctctcaaattacccatcaaaaaaagtttctgagcagctgcagacctaagtatagtctttagcataactagcatgcagcgttaccatgtgaaatcccacttagtttgacaatgctggaattggtctatccaattcaaagagccccttaagtgtgctccaacattgaggccttaacagagatttccccttagttcatcataaagaactgaagtcccatggctgcaaattctttgctagtccctttgagatgcagttgaagtcccttctaaacccccccatcccctaccttggctagtttagtgctctatcaactaagcatggcataagcttagaaaattccagctagacctcttggaacatgagctcacggacatttaacaggcctgctggagagtccatgtgaagacactggttgataacccagtaatgttacagatgtcccaccaaggccctagatatgcaaaggaagccatattgggaccagcccaggtgtcagctgcagactgataaccagttgacctcgctcactggcacaaaaaagcagatttatccagctgagctcagcccaaattccagactcacaaaaatttaaagatccaatacgatggtcatgtttttagtttcaacagctcactggaataagtaatgaatatttccctgactgaaactacagatcactcagcaccatgctttaagacaatgcaaacaactcatcccccaaatcattgtagaagtttttttttttaaatccttttattactcttttttaacaaacagccccagggacaggggaccaggggaagggggaggaggggaagtgaggccccagccccacaacccctccccgcccacccctttcccccttatatatttataatctatatacaagccccgggggtagggggcaagaggaactccctcagcggggtgggggcaacccaggctccttgtcccctcgggacccaggctcctctgcccgtcgggagggcccttctcgaggtggcagccctgtccgctcccaaggcttaggtatccagcgcagggcatctggtggggaggcctaggggacaggcatgtgttaaacagtgagtcacagtgagaggtcagcgatgagatggaaggacaggaaatcaggtggcaactcgaatttagagttggggccacaagggtttctccttcacctgctggtaaaggtcgacgcgctgggtgcggaagactccactgtaggtggaaggcgtggccttgagacgggaattgaggccagagaaggacctaagggaagaagggcgtctaaggcaagcctaggatccagaccctggttccaaagtaaggaagcacttggaaagtccacatccctattccgtttcaccttccagttgggggagtccgtgatgatccaggtcccccaaggttgctgctcagtttttgataatcctggaacggctttagttccactggatgcagctgaggggaaaaaaatcatgagctgcctaccttgaaatacagaatccctactcccaagtcttggcgctccctagcccctcagttcctgtaccttacctctgctcgccccaagctagcggggaagggcctggcaggtgaaggcagcacccgagtagcaggagcaggtgggggccgcacagccaggctggggggctgcagagcagggcccacaggtaacagagaaaggggaggtggggcaggaggtggtgctggcggcagggagccaaagttcaccacaggcagctgtgagtctaccatgggtagaagcatctgtaacaagaaatttgggtgtgcatgttgggggcagggaggaatgtcagaaaaccagggaaaatcaaagccagcaactggacagagaaatcaaatgaaggggaagtgtgaagatacaatatacctgctgggcaggagcccctgaagggagaaagccactttggccaccaggctgcagaggagtagaataaaaatccgaaggggatggcagatcctggcgtacctgtcgggaaacagggagaaatatatcaacccccacaaaatcattctccctaccctatcccccaatatctaatacctgcccccctcttacctgaagcaacgatgtgtcaggcaaaggactggggcagaaagccggagagtagaggaaggaaggtggagggtagagaactcctccagccggcaacttccccagctctgtagcttgcattgtggagaaatccagaaactggcccttgagagctaccccagagagcagtgctgagggaggggctgggccggggggtaggtataggggctgtgatctgaaaataaattgtggggagaaaagctgttaggaagccagagtcctagcaatgccttaagtccactagcttctagtaccctagaactgtgtcttccccttccctctccccgaaacacatctccaagtacttctgtgatccacaggcatcgagtcttacctgtaagggtgcagtgagggtgtcccagggcggaagcctccactgtttggatgtaattgagagtccatggctcccccagagatctgcaggagaggagcacggttgaaacagctttagtatctgtggtcaagaaaaaagatcaccatcccacccatagaagcaaaaagtagggagaaaaatgatgtgacaaagtggtatctcacaactctgcaacgtagaaaggcttgattataaatacataccaggcagaaaaaaattattattcactgaaggggtcatgcaatgggaagcggggcctacctgagaactggaaggcccagcactgccatagaaaacctcaggatacaggcgctggcctgaggagctgggctccgggacacagtgcccagaatccaggttcttggattgtggctcagcagaggcagcagcactgggaagcagctcccagtctcgtgatacaggaatggcctgggaaggagaggcctcgtggagagggatgtctggcatcctggacgccctggtcactcccagcaatcttccccagaaatcttgggcctttccaccaaactcttactcccacttacctcagtgactgatgctgttagctccttctctgctttcaagctgtctcctaccactaggcgtaagtctgagtcctgtgatcacaagaaggcaggagacattgtcccgtgacagacatgtgtcctctatgtcccacctttagtccttcccttctctccacccaactcaggatacccagatccagcccacacagaccttgtcactagtgccaaactggactgggggaccaggtcgatgggatggccgaatggggccaggctctgtgcctcggtctgtatgctgtgatcgttctgtgccaatggggccagggggcagaggctgctcccggggcagctcctggattgggcacacagtaaagtgcattgggggagggaaagggaaatccaaattggaatgcccagaacacacacgcagagagaaaaagcagaaaaaggtagggccaaagtcagattcctggaaacattccccttatccttttttggtcttttacctttctgtccccatcgtggggggcaggtggtggtctcctaggaggttcagagccaggtggaccctcacaaggaacagcattcaggggtgaggagcctccaggcctcttggggggtccctctgctgcccccttgagtcctccatcaggggaacttcgctggctgcagggacctgatgacacctgagaatccccactcaggtccaccccactgtcagactgactcatctgagaggagtggagaaggagctagttaagtcagggtagaaagcaccccaatacctgactgatgcacacatacaaactgcagaaaggggacagccaagtgagagaacagctccagactcaacccagagcaggtggggggtatgaccagtgctcaaaaaagtcccagctcagacacaccctcccaccctcactcacttctgtgccagccacatcctcaaaaggactcaggggctccatccaaggctccatggagctgggccggtaactctttcggctagtggctggagaagggagcaccaaccagaagagaagtgaggagatgacagttcagaagcccctctcattcttaacccttctaccatagtcctttcactcagctttactcaccagtatgtaaacggttccagatgtgaggggtcagggcctctgtgcctgtatctctggactctgcctgagggcctgggccctcaggcttagagcccaagaatccagagctatgaggaggtggcaaagattcctacagatgagaagggccagaagcaaaacatgaattgggtgggaattgggaattataggaagccaggacagagtggggtgacacagggtgtggggacaacaagggagacacatgggagactaatactgagaattctggagtaaaaacacagtgaaagaaacaggaaagaaaacagagaaaacataacccagaagaattttcacgagtaagagtgcagtgaagcacaatctcaaacccatcccttacctcctgtagcagctctggttttctgggaggccgctcccgacgtttagggggaaagggactaaccccggcagagtcccgaggagtcccacccacccctctcaccattggccccggctcctcaaagtgggggtctgggaaagagaaaaagggtcagcatctgcctggctctgccactgaccctaacttttcctctctactccacctcccaattcttctacccttgctccctgcagaaacgcacccagcagcagggcccctaggccaggttctccacccgctccctccagcacttgaccttctctggggatggagatattcccacccataacccctccagcttaccagaactgaggccgctgttgaccctctggggctcgtatcgggttgggggcctaggagaggggccctgaggggcttggggaggcccaggcttgtgccttggatgaccccctggtgcagttacactcccttgacggctactaagctgggccagagcctgttggatgccagcagggttgctgtggataacttggtccaggcggaagacagcagaactgctgggaggtgggggaggcaggggaagccccgggggacgctcctctggaggacgactggagaaaacagagcattagctccagtatccactaaatcgttactttttcccacaagttatgtttcccaacttctgcttacaacctattctcttccctattaaagtccaggtgtttttgagtccttctaagggttcctatgcgtacagatgcacagactggaaagcaaagaaccagcaatgaatacataggtgggtgttcttgactctaacaccctaccaaccgctttccagttgccttagccagacatggaaatcctactgacattctagagcccatggcccctcaggccacaatctccactccacccaaacttatctttccctcaggctttttccccctcctccaatttttaaaccacaataaatttgtttgttcctacccaccttcggttcttgggagagggccagctcctcttgtcgcctcgtcctggcccggtccttcctccaggacccccaccgcctcctccactgctgctgccactgctgccagccttgccccctgggccagggcgccgattctgccgttccatgcctggccgctgacttgagaagctccgtttactcaaatccttggctctctggctcagatctccgcgggacatggctgaaatacctggtacggctccacctccacctcccccaggagttcccacagccttgggtgtcagcagtactggtgggggtgcctctttgtcccctcggcgctcactggtgaagtcactgctctctgatgcagtctcccattcctcattggcttggtctgagttctggtttgacagatcaggagacttggcagctgcccggcgaggtgctggggccactgtgactgttgtgagggcctcctcaggtgcaggagcggaggctggaagggttagggagggcttgccctcagacccccttgcggcattctcccgttcctgcttcagcctccggaaacgaggcggtttatcctgctgctgagccctcccatgtcgcctccttcggggtcgctccccatcttccatgcccacattgctacctccattgctgcctccgcgcgccacaggggacagaggccctgggatcaacttctctttcaaaggctccttacttggtggcaaagggcctgtgggaggtttcttgggagccagagacttggctggagggctccagcctgggcaaacttgaggagggggcctccctcctcctcggccccggcgagatggcacccctctgggagtgaagactcgcccaccccgggcagtgaagcgggctggggctggtgaaggtggggctcctggtggtgggggagcgagagggacctgggtgagtgttccctccttgggtgtgggagcctccttgtctgaaggagccagatcactctcatgggtctcgctgcctgtttctgagccccgctgccggcgccgcttggggatttcctcatactctgaaccctcgctccgtgtctcgctggcagtgcggcctcggggagcaggagggtggtttggtccccctgtcccacctccacgcccatcatctcctcgaaactctcggtaactgcggaattcccggcttcgggctccccgccctcgtcccccataggtcccccgaaaacccctccctctggcaaaatactcgcctcggccccgaccccggcaagaggtaggacccactctttcatacgaatagtccctccgaagccttggggcaggggaaagatttccattgggtggggtctccttggggccccctagcttccccttggttatcttgagtgggtctggctttgggggtttgggggtttcatccccctgttcgaggggcttgggaggcagctcttctacttttgtaggtggtggaggtttctttataggcccagcccggcggggtggggcccctggctcctctggagggattccacgacgactgctccctggacgagggccccagcgggtctctgtgcgactctctctgcgtggtggtggggggccctggcctccactcccgactccgcgggcaggctttcggcctgcttctggccccgtcagctgtgcagtctcctccttagggggctccttcttgggtggtggagtttgtatcttggccacttcatcactgcctgggggccaggggagtggacggggccctggttcctccagaggaaagcgagagattgggggcccaggggctccattctcaggaaagcctggataactggccagatagggtggtgggggaggtactggaggagtctcgctcctgaagagacagacagaaagaatggaaataagtatctcaggaaaaccagaactaggtgggaaaagaacactttattatgatgcagactctcttttactatttttctgtttgttttggcagagatggcatccagttgccgaggctagtctcgaactgctgggctcaagcaatcttcttgcctcagcctcccaaaatgctgggattacaggcatgagccactccatccagcctctcctttcccgttcatccctatccctaccactaacccaaagtacctttctcccaggcctagatcctttcactgtgaactcacccatttctcatgaccaagactcacctcatccccttgtcatcctcatccgcagcctggcgcagaggtgaggtaagtgggcggggttcagcgggtgtggcggtgaagacatctcctacccaggccaactttggatccaccggtggagtgccccgttcccgtaacatagcaggtgcatgacggtcaaatggctctgagcttgagcccccactgtctgaacgctctcggggaactaggcctgaagaaaccaaagaaaaagaaaaataatcctattcatgtcacaagccctccagcccaaaaagcatctccccttgcggtcaagtcagctcttccatctcttgttcccagtaggtccgggccttgcctgctcttatataacaaggttatccactcagattccctacaagagaatcaacccaccccaaataaatcctggcaaatgaaggaccactgcttctttcattcattcattcatttttgagatggagttgtgctattcattcattcatttttgagacggagtttcgctcgttgcctaagctggagtgcgatggcacaatctcggctcactacaacctccacctcctgggttcaagcgtttctcctgcctcagtctcccgagtagctgggactacaggcgagcgccaccacgccggctacttttttgtatttttagtagaaatggggtttcaccacgttagccatggtggtctcgaactcctgaactcagttgatctgcccacctcggcctccctaagtgctgggattacaggcgtgagccacaatgcctggccaaccactgcttatttcttaactaagcccatttttgcaacagagctatctcagcagtgctaagcatatgcccttccctcatcactatgatgggcaaaacctatcataccagagtcacagtaagaccctaatatccaatgcctaagactgaggggactttcctgtttctcactcctcccatgcccccttaccagagggatgcacaccaggagggtagaagtctagagggggacgaccctggaggagccgggggtccacataaggaggaatcatcatccatcggggatcaaagttcattgggggcatgggtgggggccggcccagagcacctgggtacagggccttggggggcgggggtggagcctgtggagctggcacagcccccagggtcacaggctgtggtggtgatgggggcactggggtaggaggggcagagccctgttgatgctgctgccactggtgctgctgctgctgcttcaggagctgctcctaggaaaggaggaaagacaagatgagagaggctcaaagcacacatggacaaaggaatcagcaaagaaaaaacttggactaggggaaattggcgtgacaatggagacaactggacaaagaagcaaagggacccagaaggtaacttatgaagagaattagggaccgaagccaggaagaaaagcagcccttagagggtaaacaacttgatttcacctgctgctgccgctggaaacgaggaggcaacgacttctgatatttggggtagcccaagccctgactagggggctggcgggtgggaccaatcccatcacccttgggttccacctttggaactgggggtgtggtaggaggaggaacctcttctggtggttcaggaccctcttttgagggcagttgtggttccactgcatcggaaaaaacacaacagagtgatctagtccaacaatagacactccatgaacaccccaggaatctcacgtctcatctctagctcccttaagactaaaatattctattcaacatctattctattgaagcccctcccatttaagacccattaaagcacttcatggcctctcatgagcctatggtggtggcattaactttctatgaaaccattagaacaacagtactttcttcagtcttggcccataggaaatagttttcatttttatttatgtatttcttgtgagacaggatttttttttgagacagagtcttgctctgtcacccaggctggagtgcaatggcatggtcttggctcacagaaatctctgcctcccgggttaaagcgattctactacctcagcctcccaagcagctgggactacaagcacatgccaccacacttggctaatttttgtatttttagtagagacgggtttcactatgttggccaggctgatcttgaactcctgacctcatgttctgcccgcctcggcctcccagagtgctgggattacaagtgtgagccaccatgcctggccgacagggtcttgctttgttgcccaggctggtctcaaactccctaggctcaagcgatcctccaccccaagcctccctaagtgttgggattataggcgtgagctacagtactctgccaagaaatggtattagactacaacctaagattccagacaaaaccttccctccttcagatatacaaatgatagaacactatcactgatagtccaataaaccaaaacaactgccttctacttcatttatccccagccttaccaccctgcacctttaagcaccttgaagcagtgatctgacatctggtagtacctatccccatctccatacctgggctggcttcgaagctgccactgctggtgctactggtactgccaccaccactcaccagagtgggagccgcagccacacctggagtaggagtagattgggcaggaggggcctgtgctggctcttcaggttctttctctggtgttggggctgatgctggaggtggagctggaggtgcagggagttctttagggactgcaggtggtggagctggggtagaaggggcagcaggtggggcagcaggctctgctttgagccgcttgtcaggtgccccaaacttttcatcgagtcgcttgagcttctcagcacaggctgcccggcgctcttcttgcatgcgccgctcctcttcttctcgccgtcgccgggcccgctccactgccagggaaatctcagatgacgactgctttcgtcgctgccgccatgcctcatcctcatcttcaggtgctgggggcttgcagggaggacccccacgatcctgtcaattggcaagacccagcagggccaggggaatcagttactatgctttctatcatctcttttacaacaaatcaactgtcgctacttgcaggatgcaacgacccaggctttggggttgatctctctgggtggtgacaaactcattatcctggtcttctttgagaccacgtcttgctatgttgcccaggctggtcttgaacttgggctcaagtgatccttctgcttcagcctgctgagtagcttggactactgatgcatactaacagatccagctatctagccaccctagtctttttatttttctgttccctctctccttccgaaacccaaacacccagggctcctttttcttctttcctcattagcatcccagtttctcacttcttacccagactcccctattaccaaagatatttaaaagcttcccaggatgttctgcagcctggcacttcacacagcccatttttagcaccccccttcctctatatcacaaccgcttcaattactcagctgacaccaatttcccacagctgaccctctcaatcccttattggagacactcactgggtagtccccaggggggccccagttcccggcggggccccggtgaggtgggggtaggggaggctttggggcaggaggtcccggctctgtctctggaggccgagaggtttctgcccaggccgtcttaggagtgggcggttcgctgttgggggagttgccctttttgccatctgcttcagggggccgttcctcaccagaagctgattgggaatccctgctgtgagcagatcaacagtgaaattaaaatcagctgcaactaatatactcctctaagagtatattaccaaaatacaaaccaagaccccctcctcttctcccctgatggccctaactcactggccctcagctccctcctcatcagagtctcgcccatcttcctcatcgctgaacttgagcttttcagtgtagtcaacctcttcatgggcccctgaggggaaatatgagtattagtaacccaagcattctgccctccaatcttgggaggtagtctggaactatgtaacaagatggactaccaatgccaatatccttccctccgaagtctagatccaccaatgaagtcttgtcattcttactcctctcaccactttgcaaggacttggtattccccatccatcctcccctactcttttttttttttccttttaaaagtctcgctctgttgcccaggatggagttcagtggcacgatcatagctcactgtgacctccaactcctgggctcaactgatcctcccaccacaacctccagagtagctgggaccacagatgcacagtccacacccaactaaaaaatttttttttttttgtagaggtggggggtcttgctgtgttgcccaggctggtcttgaactcctggcttcaagcgatcctctcacctaacactcccaaagcactgggattacagatgtgagccattgggcctggtcttcctacacttcaatgtctgcctttcacccacataaccctgtatttttttttcctcattaggttttgcctttcaagatccaaattcttgacccttaatatccacttacctgcccaaccatcatcattctcctgatccaactgatcaaactctttgagattatcctctttgagaatagagggacgacccacaggctctactaagcgcattggtggccctgagcctcgggggcccgccacacggggaaaacggctgtacacaaaaaagaaaatgaaatatggcatgttgtataaccacatgcgagactgatcctagactgagcctcctggctagaaaaccatctcctcccccaataagcttcccctgcccccagccacaaacccagacctggattgctcacctgggcccatcaggagtggggtatcggtaaggcccctggggtccatagggcggagggaacgggagatatgggggatacatctgtaaaagggtccaacagtagctgctcagagggacagtcatatacccttctagctccttaagcctgctatcaatcatcctcccaccctcccttctatctcataggtcaaagactaagtcctgattcctagctctccagcttccagtgtaatcgttccaagacaagacaccaagactcacgaaaggcggcatcattccgcggtagggagggaactggggtgggcctgaaggctgtagcccaccccggggatcatgaccatgatgaagtttggagtccgggccctccagctcatcagggccacgcccacctccgtccctccaagttgtagaatctgtattttggaaaaggtagagagaggtatcaatgattggaggacaagtgaacacagctgaaagtgatggggaggaaggtgaataagccagcacctagctctgagatgcaataggtaatgtcttggccaaaaggcagccactcactttgggggcggaggcttggtccgggcccagacgactgttcggcagactccctttccttggcagccttgtcctggtcgccagccgcctgcagggtcggaaattcctctcgagagaatcgtgacagtaggcttgatgcccttccacctattaggatggggatgcagaacaggagacagaagacatttcctgaggacatgctataaaagtggaagactctggctgggcgcggtggctcacgcctgtaatcccagcactctgggaggctgaggcgggcggatcacgaggtcaagagatcgagaccatcctggccaacatgtgaaaccccatctctactaaaaacacacaaaaaattagctgggtgtgttggcgtgtgcctgtagtcccgctactctggaggctgaggcaggaaaatcgcttgaacccaggaggcagaggttgcagtgagccgagattgcgccactgcactccagcctgggtgacagaatgagactccgtctcaaaaaaaaaaaaagtggaaggctctgacaggtaccagaccatcaggtttcccgccttcaaactcacccccctacagaataactgcttattccccaaggaggtcagttctggcaccactacactccatcatataagactgagacttaaacttgctcatgtgcctccatgaaactgaatatgggtggtccttgatttagccaaagaggaccaaggtcacttggctgaaaatacagtgcagggttcatgcatcccatggtgcccagacacagctccccaattaagtgctgcactcaccatctccatgtgctccatgggtgacgctggcttgtgcccaggactttaccccgcttggaaccaaaggagtgttctggggaagtgttcagaaagatgataaatgatgtgggtggggcagctatgaaccattcttcctccccacccctccagttctccaggtacctcgggggctgctgggggtcgtttcggctggttggaggcaggcgtctgtgaagccggcagtggctgcgattccggcggctgagcggttgaggcatcggaactgaggggacagaatgggaaggttattcacacctgagatgcctccctgacttctccaactggtggagactcaggactgaaatcatgcccattgctaccatttacaaatataaggacaaattaattttgtcatcctttgtaggctgttgtctattttttcatgctctctctccaagacaaaaagctaaagtttagtaccattccttagtcatttaacaaggaacctgcaataggtaagaaagggacctcttcgtctctggctcagacgtggctggactaaaccaagccccaatgctccctgaagttcaagttaaaatacccatcactctaggtcccccaagcctctgtctacctcttggggtcggactgctcctgtttgcttgcccatcctgttccgtcttttggcactagtgagacattggggtcattgcctttgttctcggctttcaggcttggaaggttggctggaggtggcatacgccgggcaatggcaactttcccgagactctgcaggccatggcgaggggcaactggagaacaagacggagagagggtcgaaaatgcctcatgtgggagatctgatggcctcctatcctgggacacatttatacatgttgaatattttattacctacttcctccaaacttctcttagaagggattccttcccctgcccttaataatctctgaaatcgcgctgattgtggtggctcacactttgcaatcccagcactttggcaggccgaggcaggcggatcacctgaggtcaggagttcaagaccagcttgaccaaaatggagaaaccctgtctctactaaaaatacaaaattagccgggtgtggtggcgcatgcctgtaatcccagctactcaggaggctgaggcaggataatcgcttaaacccaggaggtggaggttgtggtaagtcaagatcacaccattgcactccagcctgggcaacaggagctaaacttggtctcaaaaaaaaaaaaaaaaaaaaaaaaaatctatgaaatccctatcaagaaggctgagatatgtaacattcaatacttttatgtgagattggttgatcatgagcctgcaagaagcaagctggcctcaaagtttcccaaatccacatttattttcctccaattcttacgtgtccaaagacagggaaccacagacacgcctttgtaggaggataactggtgttcacccagagcccacaccccctttaaaggacccagtgtaaagttgggaaatctcctctagtcttttggtatttctactacagccacttccctttaaagagctctaaaacgtatgccccatgcatgcctagctttcaaccatcagaagcatctttgcaggactctcaccagcgggtttctggatctctaaggacttgcccttatacgtatcaaacaggttgagcgaggaatacttctttccatcctttcccttggcagtcggccccgagcgatcggacattgcgctggaagctcattgagtatgttgggtcctgcaggcacctcccccaaaacgtgccagagcctgtgggccagacagcaagtgtctcagtctctgtcccctgtacagaccataacagaaacttaaaaactccattgcattatcattagggactcagatatgaggccctctggtgtcttttcctccagtctatgtaaactgcccactcttcttaagcaaccatgatctacttagctccctcatagctcaaatgccatgttccctcctttcccccagacacctttgtcaaggaaatctaagtaaaaatccagcatcctcctagtataaacactctgccctttgtgcctgtctacaaagagtaattccctacaagtaataatctcttctctctccaccaaaatcgtttcagagacttacaacaggacaaattcaagcaagagaaaactaaaaaagaagcatacaattccatcagagaagaagaaacaacactttagattccctgtttattggacacaagctccctaatcatgcccccagggccctgtaccccaggctcccagcccagcagcctcgtgtccatctgggaaggtttgcaggaaggtatgctgggagtttaaggattttatgagcttgctcagccggaatgggggttggtaccagagaaatcctcatagaacaactagggctgtacatactcccaggctataggaacctcaagtatttgaaatatcccatcttttcctaaacttgctcctgtattggctcctggaaaaaatcgcctccagatgaaatactgttttaccatatgaagaactgagaaaaagcattatggagccaccttagcaccctgtaaccatgggccagaaaacagagggccaaggccagagccatcttcgttttcctatcctcattaaaaatgtccatcaccagtgtttctttactcgatacctccagctccctaagcaagccggacgacaggtctctcagtccattccagagtgaccaggcattcgtttatggacgggaacagtgtaaagagatgagaaatagtggggaagaaagcagggaaatccagacaggcccagaatgaaagctaaaattggggagaaagaactttatgacaagctagagataagatggatgttgcttcgtaggtgtttgaggaggccaatctgtgaagataaatatatgaagggaaaacgaatacaagagtcatgtagcgaatagaccaaaactaacagaaaataatgaatacgaaagcaggtggaaaatatatggaaacaggaatggcaaaaaaaaaaaggatgtagacaacgaagtaagggggcagaggcccaagaagaaaaacggggttgggggagaaaggagacgaggaacaggaaaaatgaaaaagcagacatagggcgactgagcaacatagaaagcaaagatgctgggataaaagcaggattctagagtgggagtggctcgacacgaagaggggcgtccagaggggggaacacagcgctggatgataggagggggtccaatatggaggaaaagcgcccttccgagagaaccgtcgggcgcggcccaccaccacggggcggcagccggggagggggcccacaaatgggggtgaaaagccaggagcgcagcggagggtagggagttacggacccaggcgcaggggtcaccccctgaagccaagacggtgggtggttaggggcagactacggatcctgaatgaactgccggaggtgcgggtcccggagtagaggtaccggagggggaggggcaagcaggcccggcagcaggaggacaaaatggcggcggctaatggcagcttctcctccccccggcccaccaccgccgccgccgccgccaccgccaccgccaccacctctcccgcgccggaaaagggcgtcagcgcacggttcacccagactcacctggccgggtgcgcggggatccgggacccgggcctaggggctccccgggacgggatggcggtggggcgggggaggatggcggcggatggcgccgggttcggctcctcccgtctccctcgctcactccgcggctgagccccgactaacggcccatccgggcaaccgccgcccccgggagcaccccctcccacctcccacctccctccgcgcctagacacgccccttaatttgcataaagggcggggcactttctaccctaaccctctacttccagggctgtctttagtttaaaaaaaaaaaaaaaagggccgggcgcgcggagcatgcggaggttatttgcataaagaggagggacttaagggcactaggaccccgattggctaaggaggcgggcccccagcgtcggccgttgagccgtgttgagggggcgggaatgcggtgcaggtcggctgggcggttgggacgcagaatttacacgacgaatgtgggagaaagaggcggagcgtgcgtcggacgttagtagaaagatgggagcggagagacgttgggacgccaaaagtggaaggcaacgacacacggcccgtggcgccttcagctagggagaaagagagagaggacgggggctggcgggcgggattagctgccggagggctgagtttccgcaggcctggtaagagttccagctctcgcatccctttgccgtgagtttgaggaggtggttggagcggggaaatgcaccagaggggcggggccttccagttattatattacgtcatgcaaatgaggtggctagacagaccaatccaaaggccccgggaagcgtttcgtccgcaccacgcagcgtaggcattcttcgggcagttctacctatttgcataatgtatgcaaatcatttgaacaaagataggctaggaatgactcgttcatcaaaatatgggcaaccatcgactaagacggacatttaattttataacctataattttcatgaataaatttttatatttgaaattattgggaatttgtaatttcttaacaatgggtttcattttgtgaaatgcagtactgttaccctcctttgtctcttactacccgattctagaactctctgctcccatcagagttatacccattcaacagatcattcaatgactatgatttgaaggcgctggagataatgcacaggatattatagaagtagagaaataaggcctggcgcggtggctcacgcctgtaatcccagcactttgggaggcctaggcaggtggatcacgagatcaggagttcaagaccagcctggccaacatgatgaaaccccatttctactaaaaatacaaaaatttgccctacgtggtggcgggcgcctgtaatcccaactactcgggaagctgaggcagagaattccttgaaccagggaggcggaggttgcactccagcctgggtgacagagcaagactacgtctcaaaaaaaaaaaaaaaaaaaaaaaaaaggatgggcgcggtggctcacgcctgtaatcccagcactttgggaggctcaggcgggcggatcacctgaggtcacgagttcgagaccagcctgaccaacatggagaaaccccgtctctactaaaaatacaattacccaggcgtggtggcgcatgcctatgatcccagctactcgggaggctgagtcgggagaatcgcttgaacctgggaggcggaggttgtggtgagccaagatcgtgccattgcactccagcctgggcaacaagagcgaaactctatctcaaaaaaaaaaaaaaaagaagtagagaaataaaatatgattatgcctggggtgattgagaaatgtttctagaaaaactcttattaagagatatgaggccgggcgtggtggcttatgcctgtagtcctggcactttgggaggctgaggcgggcagatcacaaggtcaagaaatggagaccatcctggccaacatggcaaaaccccgtctctactaaaaatacaaaaattagctggactggtggcgcgtgcctgtagtctcagctacttgggaggctgaggcaggagaatcgcttgaacctgggagacggaggttgcagtgagctgagatcacgccactgcactccagcctagcgacagagtgagactacgtctcaaaaaaaaaaaaaaaagaaaaagaagaaaaaaagggccgggagcgggagcagtggctcacgcctgtaatcccagcactttgagaggccaaggtgggtgggtcacctgaggtcaggagttggagaccagcctggccaacatgagactccatctcaggaaaaaaaaaaaaaaatgatatgaagaatgatcggagtagatatctgtcaaaaatatataaataaatagatatgaagaacgagttagaacttacccaagtttcagaagaaggtgtacatctcaggtgcagagaacagattagtggaggcatgagtttgggggcctgtgcctaggctgatatggctaaataaaggaggcggcttattcattatgaaaagtgaaggcagaaaagtttgcagaaatcagatgagaattttagtcagaggctcagtaagatttaagatgacttctgttttcaaacttccaaaatgattctcttctcccttctccccggccggctaccacacataccgttttgttaccctttgcagcaaaattcttaaaagggatgtccatagtcattgtctccaatgagtttctccttccagtcttttttttttttttttttttttttttgagacagagtctcactcttgtcacccaggctggagtgccatggcgtgatctcggctcaccgcaacctccacctcccgggttcaagcgattctcctgcctcagtctcccgagtagctgggattacaggcacctgccaccatgcccagctaattttttgtattttagtagagatggggtttcaccacgttggccaggctggtctccaactcctgatttcaggtaatctgcccgcttcggcctcctgaagtgctgggattacaggcgtgagccaccacgcccagctgtaaattctttgctttatttaatagcaccagttctttcattcatctacccattcaagtgttttttgtttgtttgtatgttcggtttttttttttttgagacggagttcgctttttagttgcccaggctggagtgcaatgatgcgatctcggatcaccacaacctccacctcctgggttcaagagattctcctgcctcagcttcccaagtagctgggattacaggcatgcgccaccacaccaggctaattttgtatttttagtagagacggggtttcttcatgttcgtcaggctggtctcgaactcctgacctcaggtgatctgcccaccccatcctcccaaagtgctgggattacaggcataagccatcggccccggctcattcaagttttaaacattattgagggcttatgatatgtcaggcacaatagcataggtcactttatccccatttttagaaaaaagcctcacagaggctgagtgatttgtcaaagtgacaaagcttatagtggtggagaatgttggttcatggtattccttgctcttcatgaaatctgtcatgggcctgagtaccttgtttggacatgtgtttttgtcctgcctgcattctttgaggttaaggctgtcttacacagctggaatcccccttggtgcgtgaaaccatctgctgtagtggacacactatagcgttgttgatggattgttcatatggccaaatccttgccacctttccctcaagacctgtctctccttcccaaacccaggaaaaaaatcacccaaataaaaactaagctgacttgatctggaggagggggtaatttatttaatttgttgactctggcttacaattttgtcttctgtttccatatctgggtcattagaagccccttcaatcccatcatcccttttcccttcaaatcagggcaactcagagatagctttcttggctggggggcctgttggcttttccttttctctcgctttttcctcatacatcaggatcctggttgagatgggaagaggcacagggatcagggaacactcctctcaagggaataaatcatagggtgctaggaaaggctagaaggggatggggatgtgagggtggaagggggaagaggaagggcaggggttggagtttctggggaccaggactatggatagggatggggtcgggaccttggaagggtccctctaaggatggaagaagggatgatgggcaacgtgtagaaatgttgagcctgtggacaagggtagggatgggggaggagaaaacaggtaagtacaggggaggttggaaattgacactcacatttttaggatggcagatctcttgcccagcatcatcctgagaaagtcagggtagctgaacgtctccccggagccactggacacctctccaattaatttctttagctctaggtgagtcttggggactccaagtttctccagcattcgtttcagggacatgatatctgggggcagaggatggggatggggagaaggtggggagaccctctctctcctctcccacttccgcatccccattctccttcctcccactgtggtaggtgggccccctcccaaatcatgaggaatggagcatgtaggagagacctctgtcttcttaggcctgcacaccaccctgcccccgcaaatcacccgtttctcaccaatatcgccatttccattaaggtcaaactccatgtatttctctgggtgaggggagagagcagaagggataagcgctgactggagggttttcagcaggggactgaggaaggggttgccaaccaactgctaggtggaggagacaacgtggaaggaggaggaggggcaggcagaggaagtggggttggggagttgaggggccccgctagggtgtaaggagctagaggggatgctgagagaggcaggcccgggaaagggaccgcagtgtggcaggagggcaataaaggcaggttccccttttgctaccacaaaagtaaactttttatctctgctgttcctgccttgttcttgtggaaatcctaaccctcctacccccagccctgtctccaccgcctacagtttccccctcacctttgaagccttccagtttggagggcagatcctcatcactgctatatttgggatcgtctaggaattgctatggaggggaaaataagagccagggtaggccctccccatccacgccccatccccctggctctgcccccttagttcttccttctaccttgttgatctcatccagcctctcttcctgctgggccttcagcagtctgaaagcttttcctcctgtggggtgaaaaaaattaatcagccctcatccctcccttcctctccttaccctgacaccagcccgggctaccctaggccagctgactgccctcctagcccacagcccaggtctgtccatctcattcctccgatctaatgccgctgcctatcccaccctccctaccctgtaaatccctggtttggctcatagctcagcagatgctggtagaggtggggagacagaccaagctggaggcctctgtctgcaggctctccttctctcccaccagtcttctcagaagccttcctcccaaacttcccctttcccctcattccttcctcctctgcctcccagacctcacttccccatcaggttctgctgacactagcaccccaggaaggagggggagcctggtgtgaaatgcagattagaaaataacattctcccaaattcctcttaaatgagagcccagtgtgcgcatgaaacaaatattttgataagccactggaggtgtgcaggaagggcaggaagacaccagggatatttattctcaggaactagtatttttgaacaggtccaaggttcaggtaatgataagaccttgcattttgtcaggtttcatgagtctgggcaggcagctgtggataggaagacaaggaagggctggctgaatttttctgctctgtagatcggagaagaatctgaagtctgctggcagctccaggagggtgacaagatgggcacagggtttagaaagggagagaaacctcactcccagcctggcagctccaaggaggcccttaaaaatatggaaatgtctaacaaaacattttaatttgtttgctttagaatgtgcaacgtaaccctctcatcttatctcctttgaaatctttagtaaaatctatagagatcaggaatttaagagtttaagtagattctttggaggaactgaaagtggtacttaaagaaacagcgtttgtggacagaagagccagggagtgaggctgacatcaggtttgcacactgcgcgtgcgtgcacacatgcaggcatgtttgtgtgatggtggtgctggtcactgtgggttcaacagagtggatgatagcctctgacacatgcctccctaggcataacctttatcccctctgtcactctgtttggccagtcgcttcttggagaggtgaggacagcacatttccctcattgagatttcctggtccaaactccctgcccagggctccatctaccctgccccggcattgatgaagacacctttccttctcccttccccccaacatatttccttttctgtagctgggagttttcacttctcactgccctctccctgacccaagccaggtaggggagatgctggagtggcctctggctgctgctgctgcttttttttttttttttgagtcggagtcttgctctgtcgcccaggcgggagtgcaatggtgcaatctcggctcactgcaaccactgcctcctgggttcaagcaattctcctacctcagcctcctgagtagctgggactacaggcgcccaccaccacgcccagctaatttttgtatttttagtacagatggggtttcgccatgttggccaggatggtctctatctcttgaccttgtgatccacccacctcagcctcccaaagtgctgggattacaggcatgagccactgcacctggctggactctggcttcttgacttccctttattgcagctacattctcctgctgcagagagagctgcaaccctgtactcccaatgttctcagtgcctgctgggaggaactcacttctttattcatacgttcactcaacagatatttactgaatgcttactatatgccagacatgcctctaggcccagagaacccaacaaatgaaaactcttgtcttcatggttgatctaattggggaaggcagacaatacaaataaataagtatattaaaggtgctaggtggccaggcgcagtggctcacgcctgtaatcacagcactttgggaggctggggcaggcggatcacaaggtcaggagttggagaccagcctgaccaacatggtgaaaccccatctctactaaaaatacaaaaattagcagggcctggtggtgcgtgcctgtaatcccagctgctcaggaggctgacgcaggcgaatcgcttaaacccgggaggcagaggttgcagtgagctgagatcgcgccattgcactccagcctgggcaacagagtgagactccgtctcaaaaaaaaaaaaaaaaaaaaaaaaaaggcgccaggtgcctatggaggaaaacaaagtagggaagaggggacataggagtattattgccaatggtccccagttttttgttttttgttttttgttttttttttaaacggagtctcactctgtcgcccaggctagagtgcaatggcttgatctcagctcactgtaacctccgcctcctgggttcaagcgattctcctgcctcagccttccgagtagctgggattacagccacctgccatcatacctagctaatttttgtatttttgtagaggcggggtttcaccatgttgaccaggctggtcttgaactcctgaccttaggtgatctacccacctcggactcccaaagtgctaggattacaggcgtgagccactgcacccagctttttttgttgagacagaatctcgctctgttgcccaggctggagtgcagtggcacaatctcagctcactgcaacctctgcctcccgggttcaagcgattctcctgcctcagcctaatgaatagctgggattacaggcgatcaccactatacccggctaatttttgtatttttagtagagatggggtttcaccaagttggccaggctggtcttgaactcctaaccttgtgatcctcccaccttggcctcccaaagtgctgggattacaggtgtgagcctgacttgtccccagttttaaatatggtggtctggccagacacggtggcttacgcctgtggtcctagccacttgggaggctgaagtgagaggatcgcttgagcccaggagatcaaggctgcagtgagccatgaccgtgccattacactccagtctgggcaacagagtgagaccctgtctcaaaaaatacaataaaataataaaataaatagagtggttagagaagcgttctctgaaaaagtgatatttgagcaaagatttcttttcttttttttgagatggagtctcactctgtcactcaggctagagtgcagtggtgcaatctccactcactgcaacctccacctcccgggttcaagtgattctcctgcctcagcctccagagtagctgggattacaggcacctgccaccacgcccagctggctaattttttgtatttttagtgagacggggttttactatgttggccaggctggtcttgaactcctgatctcatgattcgcccacctcgccctcccaaagtgctgggattacaggtgtgagccaccacgcctggccgtttgatcaaagattttaagcaagcaaaggaacaagcctctgtcttcctaggcctgcacacttccccaaatcaccttttttcactgatatctctgtttccattctggtcaaactttatgtatttctttgggtaaagagagagaacagacagggtaagcactggctagagggtctttggcagaggatcgaggaaggcattgccaaccaagtgctaggttgaggagaggatgtggaaggaggagatggggcaggcagagtgggcttggggagttgagggaccatgtaaggtggatatacggctagaaagaaaaatacttatttttttttttttgagacagagtctccatctgtcgctagactggagtgcagtggcgcgatcttggctcacttcaacctccacatcctgggttcaagcgactctcctgcctcagcctcccaagtagctgggactacaggtgcgcaccaccatgttcaactaatttttgtaattttagtggagacgaggtttcaccatgttggccaagatggtctcgatctcttgaccttgtgatccacccaccttggcctcccaaagtactgagattatagatgtgagccactgcgcctagccagaaaaatatttattgatcctaaagtggagtcagcgccactgttgctgctagtgttgaatccagaaccatagctggacatgggatcagaggatgaacaagagatgctgactgggcctagagatggcaaggaggaggaggaagaggaagaggaggaattagtcaattcctaacaaaagcgagagagcagtgcgtgcagctgaagaaaggagtaaagtctcggagcagctggagctctgtgatgagcacgtgtcttccagatcacagacaggagaggattgcacaaagctctttgacttctctaatgcaagggaccattgcatggcccacaaatcctttaacagtttgaaatgaatgtgcagactccttcaccccagctttcatcacctgggcatttctctatggttttaaatataacatttgtttctaatttgtgtaactataagtccatgtgaacctcatggatttttggcttaggcaaatagcttctctgtaattggcagcaattccatcttaataagggaactgtgatttgcaaaacgaaaaaatatactgtttttttctttttccttttttttattcaagggctagtgaatcttgggatctcagggttacatcgaggtatatttatcatcatcattatagtccaggactaaaaggaagttattccaggctctttgcaaagaatctcagttttttttgtttgtttgttttattttgttttgagatggagtcttgctctgttggccaggctggagtgcagtggtgcagtctctgctcactgcaacctccacctcccaggttcaagtgattctcctgcctcagcctcccgagtagctgggactacaggcacccgccaccatgcctggctaattttttgtatttttagtagagacagggtttcaccatgttagccaggatggtctcaatctcctgacctcatgatcggcccgcctcggcctcccaaagtgctgggattacaggcgtgagccactgcgcctggccaagaacaccacttcttacaccaatcatgtggagacttctcccacaccaatcaattcttcagttcttggtagatattaactgggagtcctgcagtttaattcagttctgacactctacccataattaccagttatctaatccccaagttgaagggctcagttctacaaggctgcccccactccagataccaatcacaaacaagtccaggcctcctaactgtttttatgactccctcttctggctcagtaattcgctggaatagcacgcagaactcaggtaaacactttacttatgttagctagtttattatgaaggataaaacttaggaacagtcagatggaagagttgctccggacaaagtatcggggaagggggatttggagctttcttgtcctctctgggcacctccctgcacctccatgtgttcatcaacctggcagctctccaaccctcatcttttttgtttttttttatggaggcttcattatgcaggcatacttgattcaatagccattagttggaggtcagagggttggagctaaaagttctaactctctaatcacacagttgcctaccttggcaacaaaccccaaccttaggggctttctaaaagtcaacttactaacataaactcagttgtggttgaaaagagcttgttatgaataacaaaagctcccttcactttatcatttaggaaattacaagggctttaggaggtctggccaggagccaggatggagaccaaaacacacacacacacacacacacacacacgcacgcacacacacattaatattttgagacagggagacagggtctcgttctgttatccaggctggagtgcagtggcacaaacatggctactgcagctttgacctcccaggctcaagcgatcctcccttgtcagcctcctgagtaactgggactacaggcatgtgccaccacacctggctaatttttaaaattttttttagagacagggtctccttgtgttgcccaggctggtcttgactgcctgggctcaagtaatcctcccaccttggcctcccaaagtgctgggattacaggcctgagccaccgtgcctgaccttttttttttttttattttttattttttgagacagtttcttgttctgtcatccaggttggagtgcagtggcaccatcatagctcactgcagcctcaacttcttgggctcaagcaatccttccatctcagcctcccaagcagctgggacccgcaccaccatgcctggctcattttaaaattttttgtagagatgaagtctcgccaggttgcccaggctggtcttgaactcctgggctcaagtgatcctctggtctcagccttctagagtgctgggattacatgtgttaaccaccacacccaacccatatatatacatatttatttattttttccccgagatggagtcttgctctgttgcccaggttagagtgcagtggcgcgatctccgctcactgcaagctccacctcccaggttcacgccattctcctgcctcagcctcctgagtagctgggactacaggcgcctgccaccacgcccggctaattttttgtgtttttagtagagacggggtttcaccatgttagccaggatggtctcgatctcctgaccttgtgatctgaccgccttggcctcccaaagtgttgggattacaggtatgagccaccgcgcctggcctttttttttgtggggggatggagtctcgctctgtcgcccaggctggagtgcagtggcgatctcggctcactgcaagctccgcctcctggtttcacgccattctcctgcctcagcctcccgagtagctgggactacaggtgcctgcccccacacccggctaatttttttttgtatttttagtagagacgaggtttcaccatgttagccaggatggtcttgatctcctgacctcgtgatctgcccccctcggcctcccaaagtgctgggattacaggtgtgagccaccacacccgggcccaaaaatatatatttttattataacaatatcacaatgggagaagaacatttcaggtggagggaacagcaagttcaaaggccctgatgtgagagcagtgtggatatctggagtgttcatggagtagcagggaggcctgtgctgctgaagccaggtgaggaggaggtcagcttgggtagggccttgtaaagactctggcttttattctgagtgagactgcctcccagactggtctttccattgagaatggcttgacagactactggggtgagacagtgcttagatgctcagaaaaactgcctgggatagagagaatgacagctgctctgactgtgggacaaaaatgaagactaggcctggcgcggtggctcactcctgtaatcccagcactttgggaggccgaggcaggcagatcacctgaggtcaggagtttgagatcagcccgacaaacatggagaaaccccgtttctactaaatgtacaaaattagccaggcatggtggcgcatgcctgtaatcccagctacttgggtggctgaggcaggagaatcgcttgaacctgggaggtggagattgcagtgagccgagatcacgccattgcactccagcctgggcaataagcgaaactccatcccccccaccaaaaaaagtgaatactgaagggtatataggaagacaagcgggtggagaaggaaactcagggccttctgagaaggaaacagagatgaggggaaaagaatagacatgcaagaagatgctggggctcagaaagtgataccccaaagactggtgctttgaaatgctgagaggccttagaagctgccttagaattgtcctaccacactttctggaatttccttatctgactgaaaaaacttctttgcaaaagaagtgcaattgtcttaagacctcctgcctagagatcttatcaaatgaccagatcaaccaccagagagaagatattaggagtcatcatcatacccagatagacttttcttctctttcttttcttccttttgagtcagcgtcttgttctgttgcccagcctggagtgcagtggcatggtcatggctcactgcagcctcaacctccaggctcaagtgatcctcccaccctagcctcctgagtagctgggacgacaggcatgtgccaccacgccttaggttttttttttttttttttttgagatggagtctctctctgtcacccaggctggagtgcagtgacatgatctcagctcactgcaacctcctcctcctgggttcaagcaattctcctgcctcagcctccggagtagctggggttacaggcgcccgccaccacgcccagctaagttttgtattttttaggagagaaggagtttcatcatgttggctctggctgatctcgaactcctgacctcaggtgatccacctgccttgccctcctaaagtgctgggattacagacatgagccactgcacccagccatggtgactaattatctttttttttttttttttgagacagagtctcacactgtcgcccgggctggtgtgcagtagcgcgatctcggctcactgcaacctccaccttccggattcaagtgatacccctgcctcagcctcccaagtagctaggattgcaggcacccgccaccacgtccagcaatttttttttttttttgagacggagtctcgctctgtcgcccaggctggtgtgcagtgacaggatctcagcttactgcaagctccacttcctgggttcatgccattatttttttgtatttttagtagagatggggtttcactatgttgcccaggctggtctcaaactcttgacctcgtgatctgcccaccttggcctcccaaagtgctgggattacaggcgtgagccacagtgctggtcttttttttttttttttttagatagagtcttgctttgtcacccaggctggagtgcagtggcatgatcttggctcactgcaacctctgcctcatgggttcaagagattctcccgcctcagcctcctgagtagctgggactacagatgcgcgccaccaagcccagctaatttttttgtatgtttagtagagacagggttttgccatgttggccaggatggtctggatttcttgacctcgtgatccgccctcctcagcctcccaaagtgtcaggattacaggcgtaagtcaccgtgcctggcttctttttttttttttttttaaatatagagacaatggatcataatatagagacattctcatcctaatgttagcacaacggggatgcagatggtcaggatctggagacttgcaggaatagagcagtgagccaaagtgcagcctggtttatgcttaattataactatatttctgcccagatcccagcatgcaattcttgtcaatcttgggacagtttcaatttactctattgaaagtttttattaatattttgataactggaatttgatttcgatgcaattttttttttttgagacggagtcttgctctgtcacccagactggagtgcaatggcgtgatctcggctcactgcaacctccgcctcccggttccagcaattctcctgcctcagcctcccaggtagttaagattacaggcgccgaccaccatgcctagctaattttttgtttttagtagagacagggttttgtcatgttggccaggctgctctcgaactcctgaccttgggtgatccacctgcctcggcctcccaaagtgttgggattacaggcgtgagccactgcgcctggccgatttgtttttgtatgtatattttttaaattttatgctttactagaatgccaaagggatctgtggcacaaaataactaagaaccactgctgtaacctctctctcccctcacccctttgagcctgggagtggaaatatcccctgcagttctcttacataacactcccacctttgtgtgtgcgtgtgttttgtttgttttgttttgtttttgggatggagtctcgctctgtcacccaggctggagtgcagtgaagtgatgtcagctcagtgcaacctccacctcccaggttcaagcgattctcctgcctcagcctccctagtagctgggactacagatgcatgccaccacgcctggctaattttttgtattttcagtagagatggggcttcaccgtgttagccaggatagccttgacctcctgacctcgtgatccaccctcctcagcctcccaaagtgctgcgattacaggcatgagccaccgcacccgttgtctttaataatgtttttgcctgcttaatatatagtttctgagagatgtgagtcttcctctaatattgtaggttacttttctgtcgctgctgcacaaatttttttttttttttgagatggagtctcactctgtcgcccagactggagtgcagtggcgtgattttggcccactgcaacctctgcctcctgggttcaagcgattcttctcttgagtagctgggattacaggtgcatgctaccacgcctggctactttttgtatttttagtagagacggagtttcaccatattggtcaggctggtctcgaactcctgacctcgtgatccaccctcctcggcctcccaaagtgttgggattacaagcggtagccactgtgcctggcctaaacttttttttttaagcatccttgtgcagagactccaagggcaaacaagagtagtgccaaccagcctggcagagctgaggcaggcctgaactctggcccctagagggaagaggtgactagtcactagccttccttcattctctcacccagagagaaatggggaaggaagagaaatggagtaaaagaataaggtatgtagatggggagagatgggaagggaaaacatggagaatgatggggaggcagaaagtgatgcgaagagagatggaggaagacagagagagagaaagacggagaggcagaccagacacggcagctcacacctgtaatcccagcactttgggaggctgaggcaggtggatcacttgaggccaggagttcaagaccagcctggccaacatggcaaaaccccatctctactaaaaatacaaaaattagccaggggtggtggcatgtgcctgtaatcccagctactctggaggctggggcaggagaatcatttgaacctgggaggtggaggttacagtgagctgagagcgcaaaaaaaaaaaaagaaaaaaaatagaatgtctcacgtggaaggtgctcgctgaatatttgttgaatgagtgaataagcagaagtgtgtatgcatgtgacagagaggcagaggggtaggggtgtgtagagatgtggcgtttgagtggacacgggggaagaaacaagtaatatgaataacatggtgagacagaaagagttgtggacagagctgtgggaaatatgagagataaggagagagatactgaaaagagcgattaagagagatgaagatagggtgtctggcccatggaaggccctcgtgaagagcaatgctgaatagatgaatgaacctcaatgcccagcagtggtgggatgaaggggatgctgtgcagaaaccacactacccatcagagaagcaactctgctcgtttccccttgagttgatgagggatttagcaaccagtggaatgaagagcaagggaaagacacctgcgatctttcagaagcaaaatggacagggcctggagatcttttggatgggggaactgagggagaaggcagagtaggatgaatcccaggtgtttgccttaagtgactggggctttgtgtttccattcactgggacagggatgacaggaggctgacctggtctgagtggacactgatgactttgaaatgcctgtggagtattcagggtaagccgcctagagagcagttagatagtgtggacttaggtctcaagaaagaggcctgagggggagatgtagattggggacttgacagagaataagcagtagtgacaactgtggctatgacaggattgcctaggaaagccatggtagatgcgcaaaatttattgaatgaaagtgggaagccaggtgcatgcctataatcccagctacgtgaaaggctgaggtcggaggaacacctaaagcccggagtcaggactttgagactagcctgggcaacatagtgagatctcatctcaaaaatatatataataaaaaatatataataacactttttaaaaagaaagtggggccaggggtgctagctcatgcctataatcccagcactttgggaggccgaggcaggcggatcacttgaggtcaggagttcgagaccagcctgaccgacatggtgaaaccccatctctaccaaaaatacaaaattagctgggtgtggtggcacatgcctgtaatcccagctacttgggaggctaaggcagaagaatcacttgaacgcaggaggcggaggttgcagtgagccgagatcgcaccattgcactccagcctgggcaacaagagcaaaattctgtctcaaaaaaaaaaaaaaaaaaaagtgggagaaacaacccaaaaattttccaacaggacagtggtataaaagcacacgtttagggtacaggagtctgggggactcaggttggatggcttttatgtccttgggaaagaggaggtgagatttcaaagtgaaacagcttccatggtgacaggatctgagatgtaggtcatggagagtcaaggtgatgattggagtggacaaggtgaaataactgtgaagttgcacacttagggtattgaaaaggcatttgcgagatgggtacaagaagtttcatagcagattgagccataataagaaaaacaaaaaatagaaacaacccaattgtacttcatcaggtgaatagatcaacaagctgtgctacatcatataaaggattaccactcagcaaaaaaaaggaatgaaacactgatacatacaacagcgtgggcgaatctcacagacattaagcagaatgaaaggagccagatacaagagtatgtactatatgactccattaatatgatgttcaagaacagactaatctatagaggccgagcgcagtggctcaggcctgtaatcccaacacttagagaggtcaaggcaggaggatcacttgagcccaggagttagaatccagtctgggcaacatagaaggacctcgtctctacaaaaaaaaattttttttttttttttgagacagagtcttgctctgtcacccgggctggagtgcaatgacgcgatctcggctcactgcaacctctgcctcccaggttcaagcaattctcctgcctcagcctcccgagtagctgggactataggcatgtgccaccacgcccggctgattttttttttttttttttgtatttttagtagagatggggtttcactgtgttagccagcatggtcttgagctcctgaccttgtgatccccctgcctcggcctcccaaagtgctaggattataggcctaaaccactgcacccagcctacaaaaaaactgttaaaaaattagctgggtgcggtggcatatgcctgtagtcgtagctactcaggagactgaggtgggaggatggcttgagcccaggaggtcaaggcagcagtgaactataattgcactactgcattccaacctgggtaacagagcaagactctgtcccaagaaaaaagtctacagaggttaaaaatggtaaaatggttgcatctaggaggggaaagggatttaccaaaaaggggcatggaggaattttccaggataatgagaattatctatatctctattacagtgtggttgcatgggtgtacatattggccaaaggtcatcaaactgtacattaagatctgtgcattttactgtatgaaattatatatcaatgtttaaaaatgtcatttatggctgggcacggtggctcacgcctgtaatcccagcactttgggaggccgaggcaggtggatcacgaggtcaggagattgagaccatcctggctaacatggtgaaaccctgtctctactaaaaaatacaaaaaaattagccaggtatggtggctggtgcctgtagtcccagctactagggaggctgaggcaggagaatggcgtgaacccaggaggtggagcttgcagggagccgagatcacgccactgcactccagcctgggtgacagagcaagactctctctcaaaaaaaaaaaaaaaaaaagtcattcatatggacattaagtccattaaggagttggcagaggttgaaatagagaggaagtgggctgggcatggtggctcacgcctataatcccagcactttgggaggccgaggtgggcggatcacaaggtctggagttcgagaccagcctggctaacatggtgaaaccttttctctactaaaaatacaaaaattagcctggcatggtggcaggtgcctgtaatcccagctactctggaggctggggcaggagaatcgcttgaacctgggaggcagaggttgcggtgaaccaagatcacgccattgcactccagcaacaacagcaaaactctgtctcaaaaaaaaaaaaaagaaaaaagaaaaaagaaagaaaaaataaatagagaagaggctgcagagtcagggatgggctcttgatgaatgtgagggcgagtggacgacaccaaggagagattgaaggtcgtgaggtcagatgctatgagcctcagaggagaagctgttctcagaagctgaaagtatcatcacctgggagccattcattagttgaaaaatattgataagacttggccagagaagtcactcaatctcacccctgccagcacgtagaggaaccctggtgggggtgggggaaagatgagatcacctgtgctggattgtggacttttgtgttttcacctgttttcatggtctgagttgggagtttattggcctcaactacatccagccagcccacagcttgttgttaaagaagtcagaccagagactgggtgcggcggctcacgcctgtaatcctagcactttgggaggctgaagcaggtggatcacttgaggtcaggagttcaaaaccagcctggccaacatggtgaaaccctgtctctagtaaaaatacaaaaaagttagccaggcatggtgacaggcgctgtagtcccagctacttgggaggctgaggcaggagaatcgcttgaacccgggaggcagaggttgcagtgagcggaaatcacaccactgcactccagcctgggcgacagagcgagactccctctcaaaaaaaaaaaaacaaaaaaaacacacacaaaaacagagaccagtgcacatccacttcaacactgttttatttgttgcctttcctcttgagtgcctgggaataatttctttagaaaagttccatccttggccaggatggatgcagtggctcacgcctgtaatcccagcactttgggaggccgacgtgggtggatcacgaggtcaggagttcaagaccagcctggccaagatagtgaaaccccgtctctactaaaaatatgaaaattagctgggcatggtagtgggtgcctgtaatcctggctactcaggaggctgaggcaggagaatctcttgaacccgggaggcggaggttgcagtgagccgagatcgcaccactgcactctagcctgggtaacagaacaagactctgtctcaagaaaaaaaaaagaaaaaaaaagttccattcttgtgcccactgtgctgattagcgcagcagttcctgtcttgcaggttagccttccctagaggttctcagagttattaaaaggggtcccttgaatgtacacacatatcaggatttattctagatggactgaaaaaaaaaacccacatactgtctttggaatctggaacatttttagctatgacaaatgtttagaagtcttagatatagaaaagagctgggagagcaggatgcccttgagtccaggtgtagcaatggcactgccacccttgcacaggacgggggaagcactggagaagaaccacacattgaacacctagggcaatggggtctggaagtttacaggtggtacccccagtttacagtagtggcaccaggactccaacctaggctgatttgtcttctaagccacattgccttgggacgtggagtagaaccatgtgattgagtgtacactgtggaagagtggagtttgtttttttttttttttgagacggagttttgctcgttgcccaggctggagtgcagtggcacaatgttggctcactgcaacctccgcctcctggattcaagtgattctcgtgcctcagccacccaagtagctgggattacaggcacgcaccaccacgtctggctaagttttgtatttttagtagagatggggattcaccatgttggccagactggtctcgaactcccgacctcaggtgatctgcccacctcggccacccaaagtgctgggattacaggcgtgggccactgctcccggccggaagagtggagttttatccccagccagttacttattccacgtccccactggtggtgacctcttctccctccccaaaccgtgggcttcttacagctgagatagtagagacaatttttcctatattgatcctttggggtgtgaatggggtgttgatagaaggaggcaagcaaggtaggggatcgggcagaagctggaatcaaggcccagttgagaaaagccaccattggtagctcgggcctcccatgctctctgaccaccagggggcaggccttgccttgccatgacgcctccatcccacatcctctagttagatatccctggggtggcagccacttcgctgctggagaatggctgagttggtccttcccaggttgtgtggcatgtgtggttgttccggtagcttagggaggtaaaataatttgttcaagattagactgggcacagtggctcacacctgtaatcccagcactttgggaggccgaagtgggaggattgctttaggccaggagttttagatcagcctgggcaacacggtgagactctgtctgtacaaaaaataaaaataagtgagccaaacgtgatgatgtgtgtctgtagtcccaaatactctggaggctgacgtgggagggtcacttgagctcaggagttcaaagttcaaggccacggggagctatgatcatatgatcacaccgctgcactccagaatggttgacagagtgagaccctgtctcaaaaaaaaaaaaaggttgtataacataattgtggggattgcgggggagctgacatttgaacctagactcattccaaaccagcattcttaaccatgagatgactgcttctccaaaagaaagctctgaattacttcagtgatgggtgggaactggacagtctacaaaagtactgtgacacagagctagaaacacagatacaaaggaaaaaacatatattaggtcaggtgtggtggctcacacctgtaatcccagcactttgggaggccaaggcgggtggatcacttaaggccaggtgtttaagaccagcctggccaacatggcaaaactccgtcagtactaaaaacacaaaaattagccgagtgtggtggcacacgcctgtgaacccagatactcgggaggctgaggcacgtgaatcgcttgagcctgggaagcagaggttgcaatgagccaagattgtgccactgcactccagcctgggcgactgaacgagactgtctcacaacaacaacagcaacaacaacaacatgtattcatataaaatgagccaggctgggcgcggtggctcacgcctgtaatcccagcactttgggaggccaaggcgggcggatcacaaggtcaggagtttgagaccagcctggccaacatggtgaaactcagtctctactaaaaatacaaaaattagctgggtgtggtggcgcacgtctgtactcccagctactcgggaggcggaggcaggagaatcgcttgaacccgggaggcagaggttgcagtgagctgagattgagccattgcactccagcctgggcaacaagaacaagactccatctcaaaataaataaataaataaaataaataaaaggagccagaccaggagtttgagacctggacaacatagcaagatgctgtctttcaaaaataaataaaagtaaaaagtcaggtgtgatggcacataccagtattccaagctacttgggaggctgaggcaggaggattgcttgagtccaggagatcgaggctgcagtgagcaatgatcacaccactgtattcctgcttgagtgatagagtgagacccttgtctctaaaaaatgtaatagtaaaaggagccagaagggggcatgcggtaaggggtggacacatggcatattacatgtcatccttcacttctatgtgctgtattatctcctgtagctgtgtgatacacatacaagagtgtctggcatactcttgtaccaatccctgtagaggtattaccttgttttattgtgttccacagatgtgcatttttttatatattgaagtttgtggcaaccctgtgttgagcaagtctgtaggtgccacttttccaatagcctgtgctcactttgtgtctcagtggcacattttggtaattcttgcaatatttcaaactttttcttgattattttatctgttatgatctgtcagtagtgattttttttttttgagacagggtctcaccctgtcattcaggctggagtgcagtggcaagatcatagctcactgcagcctcgaaatcctgggctcaagtgattctcctgcttcagcctcccaagtagctaagactactggaacacaccagcacacctggctaattttatctatttatttatttaggcagagttttgttcttgttgcccaagctggagtacaatggcacgatcccagttcaccactacctccgtctcccagtgattctcctgcctccgcctcccgagtagctgggattaccggcatgcgccaccacgcccgactaattttgtatttttagtagagacggggtttctccatgttggtcaggttggtcttgaactaacgacctcaagtgatctgccctccttggcctcccaaagtgctgggatgacaggagtcagccactgtgcctggactttttttttcttttttgtagagctgaggttggccaagcgcagtggctcatgcttgtaatcccagtactttgagaggtcgagtgggcaaatcacttgagcccaggagtttgagaccagcctggacaacatggtaagaccctgtctctacaaaaaatacaaaaattatctaggcatggtggtgtgtggcagctactcaggaggctgaggtgggaagatggtgtgagcccatgaggttgaagctgcagtgagccgtgattgtgccactgcactctagcctaggcaacagagtgagaccttgtctcaaaaagagagagagagagagaaggtcttgctctgttgcccaggctggagtgccatggagccatggctttcacaagcaaaatcgtagcatactgcagtcttgaacttctgtcctcaagtgatccttccacctcagccttctgagtagcagagacataggcacataccactgcacttggcaagaattagctaaatttactctgccacgctgtgtaaatggaacaataaagcctagatggctggatgtggtggctcatgcctataatcccagcactttgggaagctgaggtgggcggatcacctgaggtcaggagttcaagaccagcctggccaagatggtcaaaccctgtctctactaaaaatacaaaaattagccgggtgtggtggcagtcacctgtaatcccagatactagggaggctgaggcaggagaatcacttgaacccagagggcggaggttgcagtgagctaaaattgcaccactgcactccagcctgggtgacagagcaagactccatctcaaaaaaatatataaataaataaataaataaataaaagcctagatgatagtacatctgtttacaacgtggtttactgattttaaaatttttcttttttttgtttgtttgtttgtttttgagacacggtctcaatatgttgcccaggctgtagtacagcagcatgatctcaactcattgaaacctctgccttccagagtcaaatgatcctcctacctcagcctcctgagtagttgggaccacagacatgagccactatgctcagctaatttttgtattttttgtagagatagggtttcgtcaggttgtccaggctgatctccaactcttttttttttttttttttttttgagacaaagtcttgctctgtcacccaggctggagtgcagtggcgcaatctcggctaactgcaacctctgcctccaaggttcaagtgattctcctgcctcagcctcctgagtagctgggactacaggcagatgccaccacacccagctaattttttgtatttttagtagagatggggtttcaccgtgttagccaggatggtctcgatctcctgaactcgtgatccgcccacctcagcctcccaaagtgctgggattacaggcatgagccaccatgcctggcctggcctccaactctttaactcaagtgatctgccctcctgggcttcccaaagtactgggattacaggtgtgacccaccatacctagccaaaattatttttttttaaactccatttactactattcccaatttaaattgtattttatttagagacaaggtctccctccattgctcaggctgaaatgcagtggcaaaatcatagctcactgcatccttgaaactcctgggctcaaggaatcctccttcctcaacttcctgagtagctggtactataggtgtgtgccactatgtccagctaagtttaaatttttttgtagagacagggtcttgccatgttgcccaggctggtctcaaacccctggcctcaagccgtcctctcaccttggcctcccaaagtgctgggattacaagtgtaagccactatgccccgctggtttactgaatattttaagcctactgttgaggtctactgctccgaaaaacaagatttctttaaaatgattactgctcattgacaatgtacatagttatccaagagctctgatggagatgtccaaagagacgaatgttgttttctttttcttttttttttttttttgagacggagtttcgctcttgttgcccaggctggagtgcaatggtgcgatatcagctcactgcaacttccgcctcctgggttcaagtgattctcctgcctcagcctcccgagtagctgggattacaggtgcgccccaccacacccggctaattttgtatttttagtagagacggggtttctctatgttgatcagactggtctcggactcctgacctcaggtgatcctcccacctcagcctcccaaagtgctgggattacaggcatgagccaccacgcccagctgaatgttgttttcctgcctgctaacataacatccatcctgtagtccatggtttaaggagtaatttagactttcaagtctcattatttaagaaatacatttcgccaggcatggtgactcatgcactttgggaggcctaagtggatggattgtttgagcccaggagttggataccggcctgggcaacacagggagaccccatctctacaaaaaatacaaaaattagcctggtgtggtggtgtgcgcctgcagtcccagctactcaggagactgaagtgggaggatcaactgagccctggaggttgaggctgcagtgagccgtgatggcgccactgaactccagcctgggtgagacagagccagaccctgtctcaaaaaaccaaaacaggaatcccagcactttgggagggcgaggctggtggatcacttgagatcaggagttggagaccagcctggccaacatggtaaaaccctgtctctacaaaaaatacaaaatttagctgggcttggtgatgtgcgcctgtaatcccagctacttgggaggctgaggcaagagaattgcttgaacccaggaggcagaggttgcagtgagccgagattgtgccactgcattccagcctgggcgacagagtgagactccagctcaaaaaaaaaacaaaaaacaaaaaaacccaaccaaacacacacacacacacacacacacacacacacacacacacacacacacacaaggtgattgctatgcaaattaaatatagcttcaccaatcagcttgcttctcctaatccctcatagaaatcttggagtagccctggggtgcagtgaggccagattccaggaagggaatgggtgggatgggtctgggtactggtgagcagcagggagggtaagtaggttagcttctgggccaaggagggctcctgcaggcttgttctgggtaaaagctggtctccttgaacctcggaaggtgggggaacccacatcctggtctcacccgcccaaccgcccactcacccttgggttagcagccatctaagccccaccctccccctcacacgcttagctagcctgccacaagctggccccttggcctcctagagaccctgacatctcctccagcagcatctgtcctctctcctcagggaggcaagcatttgatgctcgaggtccctggcagttgtggtccttggcaagtgatgtgtgagtcccgtgtgtcataggaagctccccatccccatctggtgaccaaaggcctggctacaagtagtgagtccttcctcctccacccagacctcactgctcagatccccttcgccaactgggacatcttccgacatggcctggatgctgttgctcatcttgatcatggtccatccaggtgacagggcgtgcgctcaggaccccaaggagtgtgggtgggaggagggagatccaggaggctggactagatgctatagggaacgggcttggtgggggctgaaacacacggctctgagggaggagtgggactgctccaaaggtgacactcagtggactcccccaattcacagtctctctgtgtcacccactgtgaggctttttagtttgagagatccaagtaaatctatgataaatttcttggtgaaacttttttttttttttttttgagactgagtctcgctctgtcgcctggctggagtgccgtggtgcgattttggctcactgcaacctctgcctcccatgttcaggtgattctcctgcctcagcctcctgagtagctgggactacacgcacgcacgaccacacctggctaattttttttttttttgagacggagtcttgctctgtcacctaggctggagtgcagtggcatgatcttggctcactgcaacctctgcctcctagattcaagcaattctcctgcctcagcctcctaggtagctgggattacaagcgcgcaccaccacacccaactaatttttgtatttttagtagagacagggttttaccatgttggccgggctggtcttgaactcctgacctcaggtgatctgcctgcctcggcctcctaaagtgcggggattacaggcctgagccactgcgcccagccatttttgtatttttagtagagatggggttttgctatgttggccaggttggtctcaaactcctgatctcaagtgatctgcctgcctcggtctcccaaattactggaattataggcatgagccactgcgcccgcctggtggtgaaactttttttttgagacagtttcattctgttgtccagtctagagtacagtggcggtatctcagctcactgcagcctccacctcctgggtaaaaatgattctcctgtctcagcctcccaagtagctaggattacaggtgcatgccattactgctggctaacttgtgtatttttagtagagacgaggtttcaccatgttggccaggctggtctcaaactcctgacctcaggtgatccactcgccttggcctcccaaagtgttgggattataggcgtgagccactgcacccggccgaaactgtttttaatgaactgagagaccttaactatcaggcatattattaactaaatgcaggagttctcaaaatgtggatttctgggaacctagaacaaattcttaggccccactccagacctactgagcccaggaatctgttctagcagatgctccaggtaatttccatacacactcaagtttgagaaccactgaaatagaatgacttgtaaatttccctaagtagataatttaatcagggattttaatatttggtttaattcatcaacatggacgggttaaataggaatctcaaccaattaaggccacgtcttcacctggagatttaattagttactttctttaacgaaaaccaagagtggctgggtgcactttgggaggccgaggcaggtggatcacttgagatcaggagtttgagaccagcctggtccgaggtgggtggatcacttgaggtcaggagtttgagaccagatggtgaaaccctgtctcgactgaaaatacaaaaattagccagtcgtggtggtgggtgcctgtagtcccagctacttgggaggctgaggcaccaggatcgcttgaacccaggggacggagtttgcagtgagccaagattgcaccactgcattccagcctgggcaacagagcaagaccccatctcaaaaaaagaaaaaagaaaaagaggaaggatggcttactgtacaatgccatttgtactaaaataatacctggataatataatgagtgatattagttaactaggcagctgcattcattaatgagcttaatttcaccatgatggtttacatttcagctagacaagttactactgaactggctggagaatgatggcagagggtgagagtgagagttggtataggaagaatttgaaaaatgatttttattttttattttttgagatggagtcttgctttgtcgcccaggctggagtgcaatggcgcaatcttggctcactgcaacctctgcctcccgggttcaagcgattctcctgcctcagcctcccgagtagctgggattacaggtgcacaccaccatgcccggctaatttttgtatttttttagtagagacggggtttcaccatgttggccaggatggtctcgatctcctgacctggtgatccgcccacctcggcctcccaaagtgctgggattacaggcgtgagccactgcacccagccgaaaaatgatttaataagcaatgttaagaaatcagattggttaagagggaagggtttaatgaggccccaaagtatctattcccatgcaccctatgcctggagaaagctgggatgttctactccaagctctgttgtcttttctctttggaataactggggaggtgtttctctgggtcttccttctgcccccaggatcctgtgctctctgggtgtcccagccccctgagattcgtaccctggaaggatcctctgccttcctgccctgctccttcaatgccagccaagggagactggccattggctccgtcacgtggttccgagatgaggtggttccagggaaggaggtgaggaatggaaccccagagttcaggggccgcctggccccacttgcttcttcccgtttcctccatgaccaccaggctgagctgcacatccgggacgtgcgaggccatgacgccagcatctacgtgtgcagagtggaggtgctgggccttggtgtcgggacagggaatgggactcggctggtggtggagaaaggtgagatgctgggaggtggtgtctcctcctggctggaggccccaagaggcaatgtccttgggaggcagggatgctcctctgaggccccttccctccctgagcctgtgtgcacttcttccccaacccccgtctccattgccccatgcagaacatcctcagctaggggctggtacagtcctcctccttcgggctggattctatgctgtcagctttctctctgtggccgtgggcagcaccgtctattaccagggcaaatgtgagtaatggagccaggggcaatagtggacgggatgggaggggcagtaagagagtgggaggagggaggacagagaccaggaagaggagagcctcgggactgcaacactgagcagctcctgtcctctctctgaccaggccactgtcacatgggaacacactgccactcctcagatgggccccgaggagtgattccagagcccagatgtccctagtcctcttcaaaagaccccaataaatctgccccaccactaactcctcatgagtctcaagtgttttcttctccattctccagatgccaaatctactctctccggattcccccaactctgaactttcccttccaccaggtctgacctggaaaggtccaagaaggcagctgccggctgtggtcccagcgcccctcccaccaccatgtgggagctcagcacatctgcttcccccagtcccaggaggctgagcctgattgtcctgagaaatgggaaggatcagatatgactcctccttggcaactgccctttcctgccaggcccacacataccctcttctggctgttaggggagcttgggtccctgaacactgtcattcacccaataaattactatttgaccccagagtgggtggaagggtgagccatgtgttttttttattttaatttttaaaaaatttaaaaaattccctattcaaaggtcaaaaagccacataagttttgatgatgatcaatttgaacggaggctcgagatggactgagaggactgagacacagaagtggggggaccatggtttttactggctggaccacagggggaccctgtccacccgcctgggttgaggaaggtgtctggggtgctcaggtgggtttgttctcagcaatgcaggcatagtcagctcttggatcctccttggtgcctctcttgtctctgcccctgaggtcaggtccctcactgctgggcactggcagcctctgcagagatgcatagtggagttcctgctctgaggagccctgggcctgggaccaggacagaaggtgctgatgggaggcgatgccgtcagatccttccctgtgagttctgctcccacctccagcctttcttacttctctccctctctctctctctctctctctccctctctctctctctctctctctcttttttctttggagacagagtcccactatgttgtccaggattgtcttcaacccctgagctcaagctatcttcctgcctcagccttgcgatagctggaatgacagacgtgagccactgtgcctggttctggagcctctctctctctctctctttcattgctcttctctttgtgtctctctcactctcattttctccctgtctctcctatcctctgtctcactttttctcttggtttctgtctcattttctctttctcttttgcctcgattttctctgcctctctcatgctcctactttctctctccttgtctcccgtccccaaccctcctctcagcgctcagccatgcttctccccactcacccactcaggatctctcttgccctcccccttccctgtccccagactcacccagctcctctccagcctctttactggaagaaaagaagaagctcaacacagcccaccctttgtgcttctcccgggccctcccgggctccccccaccagcaggcgtggactcccctgttggcttcccagtggctccagggccaggcagtgttctgggaaagcagtgggaaagcgtgtgggggtgggggcacagggggcactgctgcagggggagggagggagtgcagcgctcacctcttcgatgcagccaacacaggcaggcggacagaaggaccactgccagaagcaggagcccgcccagccccaggcccccgtagatacatatatcttcagggaagagggctcaaggttatgaagcccattccttctccagcgtaccccagcctcctggttggttgcagctttctcagattccctctccaacagttttagaggcagaaaaatataccctcagagcttctccatcccagaccttaatacctcacctcttaccaggtttctgggcctcccgtgaggtccctttccctcctgtaccagctgtccccagaggcctgtccacctagtcatgagctgcatacatcactgttccccatcacttcctaagctcccaggaccctctctatgcagatgcaagagacactttacttaccatcattccgcgataacattaggtcagggatcagggactggcctggaggtcaggaactctagtccttgctcttttaggcgaaatgatcaggggctggtgacttgcctcaagttcctcatctgtgaagtgaggggccctctgttataatcgttcccaggctggggagcctcccttatgtgccaaccctgagctgggcactttccattcctcactgctaatccccagaacatagggtatcatggtgcccgttgcccaagtaaagacccgagattcaagcctggactttactaggtcacccatcccagaaaggtggagctggggtttaaggccagctctgcccaactccagagcccagccctttcctctgccctgggctgaccacgtggtttggaggggacttttcagccctggatggttctaggtgctggtaaggggatgatggaggggaaggagcctgggcctgggtgggtgtgggcactggggggaagaagggagggtgatatcagcacacccagcaggtgggctgctccctgagccgcagagcagcgcgggagtgtgggggcccccttggctggtgtggagagctgcttcccacaggcagatgctgctagggctgaagtggggcatggaggagtatctggggccccataacttcccctcaggcacttcctcccctccaaccactggttcctgtttgagggtgaagagggggccgttctcttcaccccagagccagatatactgactagggtctggaaactgggacccttctgggtttaagaggaattctggggggtggggagcagaagtgcaggtggaggccataagggccgtgggcacagaaatgaattgtctttaatttctttggggagcagagactcagaggattcctcgacggcccagggaaactcaaacccatactctccctcccctcatcttagcttcaccccactctggggtgtgaccatccttccaccaaggtccctgcccattcccagcttacccagagcttgtggcctgcaggatggacagactccaaactggccagtgctgtctggctgaagagaagtgttgccacctcagacattcctgcccctcctctggctttaacttctcccccagcctgggttcctccccagcattgttaggagaggaagttcggctccagggttagggttacaacatctttcttttcaaacttctgggcctgtagctagggccataatctgcctcagctccagtcatttcactgatcctgccactagtcagcaaacacccaccaccttcaggtgtcttccttgattaactcttctctattacctcttacactgcatctgttgagacctcttgatcttggcatatgtctgtggacacatgtaccctgctccagttcagactgggagctctggcatatttggtgttctggtgacccacttggtgttctgcagctctatgcagcaggctgcttggctgtctgattaacaaacatgagagttaaaggcagccatactagatctacatgagccctgtggatagatcaaggacagaaagttggtgacaagttggtgacaggaaaggaggtgtgggcaatacaggtggacttcctgtaggaggcagcattctggcattgaacacagaactaagtaaaggcagcggcctgaggctctctggagagacctgggtgaaggcttcttagtggcactgtgatggagaaggagatgggtgctggaggattgcacacccactccttgaggagggtgaagactggggagcgcctgtaaggcaaggggtgaggaggagatgtggtgcctgggtgggtccatattaatttgcgtttccccttccaaattcaagaaccttctacttcctcccccacccttctccccatcctccatgttccccatgctgaataatattcagggttttttgtttgtttgttttgttttttttacattttattattaaaaagtgcaaacatagggtgaaatgagaataattgtacagtgaacatattcttaccacctagatgctactattaacattttttgttttgttttgtttttgagatggggtctcactctgtcactcagcctgaagtgcagtggtgaaatcatagctcactgcagccttgaattcctgggctcagaggtcctcccaccttagccttctgagtagctaggactacagacaccagctaccacatgaggctttgtagaaatggggtcttactatgttgcccaggctgattttgaactcctggtctcaagcaatctttccaccttagccttccaaagtgctggaattacaggagtgggccactgcacctggctctattaacattttttatttgctttatcacatatttatcaatccatctcacttttaaatatcttttaaaattacaaatatcagtacattttacatctaaacccttcagaagcttaacattgactggagttcagtatttatttccccatttcttttctggcctgaggaaggcaaattttacatacaaatctcaagtcagtactcttttttttttttgagacggagtcttgctctgttgcccaggctggagtccagtggtgtgatcttggctcactgcaacctctgccttctgggtacaagcgattctcctgtctcagcctcccaagtagctgggactacaggtttgtgccaccatatccagctaatttttgtatttttaatggagaaggggtttcaccatgttggccaggctggtctcaaactcttgacctcaagtgatccacctgccttggtctcctaaagtgctgggattataggtgtgagccatctcgcctggcctaatactgttttgtttgtttgtttttgtttttaagacagagtcttgttcttgtcacccaggctggagtgcaatggcatgatttcggctcactgcaacttccgcctcctgggttcaagtgattctcctgcctcagcctcccaagtagctggaattaaaggtgcctaccaccacgccccgctaatttttatatttttagtagagatggggtttcaccatgttgatcaggctgctctcgagctccttacctcagatgatccaccttccttggcctcccaaagtgctggtattataggcaagagccactgcgcccagccccagtattcagtttttaaactgtcttgttatcaaggctctggagccagatgcctgggttcaaattctggttctgccactgactctgtgagctccataagtttcttaacctctctgtacctcagtttcctcttagggtttttgtcaggattataattattggctgggcatgatggctcatgcttgtaatcccagcactttaggaggccaacacgggcagatcacgtgagtccaggagtttgagcccagcctgggcaatgtggcaaaaatccatctctacaaaaaatgcaaaaattagctgggcatggtggcatgtgcctatagtcccagctattcaggaggctgaggtaggtgaatccatagatcctgggaggtcaaggctgcagtgagccatgatcctgccattgcattccagtctgggtgacatagcgagaccctgtctcaaaaaaaaaaattattaaagtgtgtaaatcagtggcataaacatgttaagtgcattttgtgggtcagctatattattattagtattacggaaacacatagagatgttaccaagaaggggagatgattggagccacttccagcttccttggacctggtctttcttcccttgactctttttttttttttttttttttttttttgagagagagtctcagcctgttgcccaggctggagtgcaatggtgcaatcttggctcactgcaacctctgcctcccaggtttaagtgattctcctgcctcagcctcctgtgtagctggaattacaggcgcgtgccaccacgcccggctaactttttgtatctttagtagagacagggtttcaccatgttggccaggctggtctcgaactcctgacctcaagtgatccacctgcctcagcctcccaaactgttgggattacaggtgtaagccactaccccggctactcccttgactcttaaccactcatgctgcctacatctaccattcatgtggtccttgctgctttgttttggttattcctgcatttatttgtccttttattcatttatgtataaacatttagtaagcacctactaatggatagggctcattgtagacttggaagctctctgagggtgggagtatgcctcgtccatctgtctttactttttgtagcaagggaggtaaagctccatttccatccctccttagtgagtcagtagtcagtggtgaggctaaggcttacctctccctttctcactcagcacagggggctggagatgagcaagggaacgggaggaggtcagcccagtatgggaatcagttcttctcagggaacccagacatccatccctcaagattccagtccttgtcctagtccggcccttgacctcagagacgggatcagctcttcctccagcacctaccttgagggtatagaagaatgcaaaccacattggaaacctggagatctgtgttctcatttcagctctgctgactggcttcctgcaagctaccttccctccctgggcctcagtttctctctctgctgagccagaagatgtctaaagacccctttggttccaccctgagagcctgtctccctaacctcaacttcttccccagttcagagaacccaggcatccagctgccccaccccagctctgggtaaacaggaagctgggtgaggggagcaggggtgtgcggaaagtcccagccaggtgtgcaggtctacagggagggggtgggcccgtccctgaggtatgaaagccccctgctctggctctggttcagtctcaatgggggcactggggctggagggcaggggtgggaggctccaggggaggggttccctcctgctagctgtggcaggagccacttctctggtgaccttgttgctggcggtgcctatcactgtcctggctgtgctggccttagtgccccaggatcagggaggactggtgagtggctgcaacaggccctggtggagagttgtatcttgcggatgcttggctccctctggttgtgcctgtggtcttttgccccctctggctcagctggctcggctgtccctggtggggatgtcttgtctctttgctgactctctttccatgttcctgtgatgttgtgcttgtgtcccgacataagccccttgtgtctcctctcctcttcccgaggtacatctgtttctccgcccaagtacctatgccttgcttgttctcccttctaaggaggtgtgtgttggggatggtgctggtaggagaaaccccaggcctgcagcttgggtccactttcagaggggtaggggtgacatgagctgaatctgaactctgggcactgtgaccccacccaaccaggtaacggagacggccgaccccggggcacaggcccagcaaggactgggtaagagcagactgtctctccttccccgcttcagaccctcaggggctcccagctccctgctgcgtccccagatacctcttcctctaggaatccaggctccccatccctgcgccctgttctctcaagggtagcctgcatgggtggctgccctgcccccaatcgtggactctttgccccttccagggtttcagaagctgccagaggaggagccagaaacagatctcagccccgggctcccagctgcccacctcataggtaaggacctccaagacctgaataagagtgtaaataatccgaaggttccagttctgctcgcccagagtccttcggctccatgattccagtgctcggtttcccacccgcttcacgaccttttgtcgctcgtgcccactcttacgctcgtccccgcagtgtagtttcttcttccctccggtgcaagcaaaagccggcctggaggtccccactacagcgttctgcaccccacatccgtgttccctcggcccccaactcgcactcatcccagaaacagcaccatccctcctcccccggcccggctcggctcccgcaggggctaaaagccgccacttccccagaagtcccaagcctttaggatcgcattcccaagagcgcgtcggcccgtgtctccgcaggcgctccgctgaaggggcaggggctaggctgggagacgacgaaggaacaggcgtttctgacgagcgggacgcagttctcggacgccgaggggctggcgctcccgcaggacggcctctattacctctactgtctcgtcggctaccggggccgggcgccccctggcggcggggacccccagggccgctcggtcacgctgcgcagctctctgtaccgggcggggggcgcctacgggccgggcactcccgagctgctgctcgagggcgccgagacggtgactccagtgctggacccggccaggagacaagggtacgggcctctctggtacacgagcgtggggttcggcggcctggtgcagctccggaggggcgagagggtgtacgtcaacatcagtcaccccgatatggtggacttcgcgagagggaagaccttctttggggccgtgatggtggggtgagggaatatgagtgcgtggtgcgagtgcgtgaatattgggggcccggacgcccaggaccccatggcagtgggaaaaatgtaggagactgtttggaaattgattttgaacctgatgaaaataaagaatggaaagcttcagtgctgccgataaagatgctgagttgcgacacacgtcttaattcagggtgggtgcacgggtgcgggttaaatattctcagtactcttctggttgcttgaaacaattcatcacaacacagtgtatggcctttgctcctagggatgatggtctgcctgtcccaccccctccctgcctctgaatggccaggccccaccattagcccagttggagggtgggaggaagggggacttctcaaactccgaagcttctctaggcatcctgattttcagggccacatggtcccaaccagactctgcaccatactcttttctcttgggtaccccccaacagtgagaggggtcattacagagcccagcaagcaccactcagaaaggcccagcagcagagtaagcccctatcatgacagaggaatgaagcctggaggggccccgcacttctccccctagagctgcctgaaggcctctctgtctcctacccgacagtcaactcttctcctccaaggagcttaattcaaggctcatggggtctgaagggaggaggctgaaggagaaagaaggggagaatattagagagagatggggatggcaggaaggagcctgtggtgcctgaaaacaccaggaagttctggggaggaggaaaaaccgatgccccacttagggtgtcccatttagggtgagacggaaaatcctcacctttttttcacactttaggtcccccttcccaaaagtgagtaagtgtgggtgcttctgggatgagtaacagtgtcccccattacttcatggctgactttcagccacaggctggaggaggcagagggtgacccaaggccctatctaggtcaccccaatgggtcaccctaccccctcagcctaccacatggttttctcctgcctggcaccccagggctggaggtaaagcctaatttccgaactcagtgggggctcccagtctaggggggctcaatttccgtctccatatttgtttttggaattattatttttttgagacagggtctcgttctgtcacccagacgggggtacagtggcatgatcatagcttactgtaacctcaaactcctgggcttgagtgatcctcctgcctcagcctcctgaggagctaggattacaggcatgcaccactacacctgactaatctttaattttttttctagaaacaaggtcttgctatgttgcacaggctggtcttgaactagtgggctcaagtggtcctcccacctcagcctcccaaagtgttgggataacaggcatgagccactgcgccccacccttatttgtctttgactctctccagaagagccttcatccagggagggggtgcttttctctttccggattacccacctctcacctctcccctccttcaccacaaagaccagtgggaccaagccggcatgtgagtccttcacccacatcttattcctatgtttcattcttttttaaaaaatagagacaggatctcactatgttgcccaggttgctctggaactcctgggttcaagcgatcctctcaccttggccttgcaaagtggtaggattacaggtgcatgccaccacgtccggcagttcggttccttgttctttattgtcctcagtctcttcgatttcacccactgagagaatggaaggggatagaacagctggaaactggttgaaggaagccagaattcactaagtgcccactgtgccaagggctgagtgaggtcctctgatggaggtcaggccttctctcacatgccctatgtgtggtggacattcctatccccattggatagataggttaagtggctggttcaggttgcagagttaggacagggtgatttgaagcctagacacccgaatctctggaagtcccttggctgtgtgattcaggtacctgagaatgcggctcctctccagctctctccggactgctggccagctgcaacagccggaaatctcacctgagctgcaggattttcccagcaaggattggaattcccagagttggaaattcccatgccctgagggagaggtaattaggttcaggctcttgtttcctgggggatggggaatattctgttgggctttgtttatgtagggtctccagggccctaggagtctaaggatgggactgggtccgagggatcttaaagcctgtggagagaggacttagggagcttcttcccacccacaagaagaggcagatgcagaattaattccaagaaggagaccatgtttcttttctaagcaaactttatttctcgccactgaatagtagggcgattacagacacaactcccctggggagcagaggctcagcaatgagtgacagttggtcaccaaatcagcattgtttagacaacttaatcagataaatattttaaaaaacataatcaaaagaaggcacagaggccagggggctacatgggaacagcctattgttcagctccgttttcacggaaaacatgtctgagccaaggcagctcctacattgggtcccccaggataccccggtctcccaaataaatacattcatctgtaaataaataaataataaataaataataaataatcacaagtgcaaacataaatagagggagctggctccatggggagggctgggctccgtgtctcaaggaagtctggaaacatctggagagaggaaggcctaaggtccacttgtgtcaatttctaggtgaggtcttctcaagtcctgcagcattctggccagaaccaaaggctccctggtctccagattccagatgtcagggatcaaagctgtaggccccagtgagttctggaggccccagtttgaattcttagtggttgccagcacttcactgtgcaggccacacattcctgaatcccaggtttcgaagtggtggtcttgttgcttaaagttctaagcttgggttccgaccctaagcccccaattctctttttgagccagaagaggttgagggtgtctgaaggagggggtaataaagggattggggcaggggaggcgtttgggaaggttggatgttcgtcctcctcacagggcaatgatcccaaagtagacctgcccagactcggcaaagtcgagatagtcgggccgattgatctcagcgctgagtcggtcacccttctccagctggaagacccctcccagatagatgggctcataccagggcttggcctcagccccctctggggtctccctctggcaggggctcttgatggcagagaggaggttgaccttggtctggtaggagacggcgatgcggctgatggtgtgggtgaggagcacatgggtggaggggcagccttggcccttgaagaggacctgggagtagatgaggtacaggccctctgatggcaccaccagctggttatctctcagctccacgccattggccaggagggcattggcccggcggttcagccactggagctgcccctcagcttgagggtttgctggagggagggagagagggagaggagagtcagtgtggccatgtcggttcactctccacatcctggccctcgagctctgcccaccccacatccggttcctgtcctctctgtctgtcatcccacatcccacctggccatgacgttctgagtatcccactaaggcctgtgctgttcctccacccttcccttgagctcagcgagtccttctcacattgtctccaagttctgcctaccatcagccgggcttcaatccccaaatcctagccctccaagttccaagacacatcctcagagctcttacctacaacatgggctacaggcttgtcactcggggttcgagaagatgatcctgaagaggagagagaaaagaaaaagctgagacccttaaacttcctagaaaatacccccctactttcacctccatccatcctcccccaagaccaaaactttaaatttcccccactgcttccataccggtactaaccctacccccaaacccaaacccagaattaggaaagaggtttggagacacttactgactgcctgggccagagggctgattagagagaggtccctggggaactgttggggagaaggagaatggttaacatcgagggagtcacccttaaaggaggaacagctggctgcctgtctggcctgcgctcttagccctgaggtgtctggttttctctctccattcatctgtgtattcaccttccaggcattcaacagctctttccctgagtgtcttctgtgtgccagacaccctatcttcttctctccttatctcccccatctctctccttagctgtcatatttcccgctctttctgtctcaccatctttattcatatcacttgtttcttcccccatctctcttctcacaccccacatctgtctccatatcttatttatatatctgcttgttcattcattcattcattcattcactccatacacacttagtgagcaccttccatgtgccagacatcctgtctctccatctttctctctctctcttccccatctcttgccacatctctttctgcatccccgtctttctccacgtttttttctctccatccctccctatcagcgcacatctttcacccatcccatctctctccctctcttgcgtctccatttccccttgggtgggagagtggatgaaggctggccaggcactcacctcttccctctgggggccgatcactccaaagtgcagcaggcagaagagcgtggtggcgcctgccacgatcaggaaggagaagaggctgaggaacaagcaccgcctggagccctggggcccccctgtcttcttggggagcgcctcctcggccagctccacgtcccggatcatgctttcagtgctcatggtgtcctttccaggggagagagggtggagccgtgggtcagtatgtgagaggaagagaacctgcctggcagcttgtcaggggatgtggcgtctgagggttgttttcagggggggtctgtagttgcttctctccctcttagctggtcctctgctgtccttgctgagggagcgtctgctggctgggtgtgccaacaactgcctttatatgtccctggggcgagaggagggcggggaaagaatcattcaaccagcggaaaacttccttggtggagaaacccatgagctcatctggaggaagcggtagtgggccctgcaccttctgtctcggtttcttctccatcgcgggggcggggatttggaaagttggggacacacaagcatcaaggatacccctcacactccccatcctccctgctccgattccgaggggggtcttctgggccactgactgatttgtgtgtaggaccctggaggctgaaccccgtccccatgcccctcaaaacctattgcctccatttcttttggggaccaggtctgtggtctgtttccttctaacttccagacaggatgcaggaaaaagatagaactagaactgggaggggcttcagaaagctgagtccttgagggagagaaaacggggttggagggaaaagctgtgttgagtcctgaggcctgtgtttgggtccctgcggggagaaggagctgggggcttggtggcaggcttgaggcctcaggaaaggctgggtgggggtagcagggacaagcctgggacagccccggggagtgaaatcacccccgggaattcacagaccccactggggcaggccttcttctttcattctgacccggagactcataatgctggtttcagtcttggcttccaaggaactctggggtccctgatttttttcatgaagctctcacttctcagggccccagtgtgtggccatatcttcttaaacgtcccctgtattccatacctggaggtcctggaggctctttcactccctggggccctctacatggccctgtcttcgttaagggggggtccccatactcgacttccatagccctggacattctcctacccattgctgtggtcacatctccccagaggtctcctgtaacccattcctcagagccgctacatgtggccatatctcccaggagctccctgacccccgcccctccagaccctgacttttccttcatcttctcagcttctcctttgcttcccctgcagcagtctggcggcctcacctggtgagtccatcacatatccctgaagctctctgagcccttatccttttgttctccccacagctcttgctccctttgagccctctgtccctccctccattccttagatagactgggaagttctcactcccagacacacacacacaagcagacagcatttcagagaaaagaggtttattgggcttcatcgagggtgcagatgcctccgtgtggggctctggtcggcagctggctttcagagcctttccctgccttctggggccctgtgatccctcatgcctacttctttctctcttggtcagccttgtgcgcatgccctctcactcttcatctcttgggcctgtctctgtttctccttggatgttcttctattattcccctctctccatcctccataaataaataatttaatttttttgccttcataaatagtcccctccctgcctctagtcatcccccaagctcctccatgtgcctgctcttcctctgtgtgtggatctaggccccacctagctggtgggacagaccaacagctttgggctgggaattcctaggcaggcttgaaatcctcagccagacagacatcagggatggttcagggaggtgtggtcccctgggatgcctagaattccttctttgaaagctccggtgacttgatcagggaagacttgagctgttggaatggccaaaggagaggtggtgacgacccctgaaatggtcagaatggaggcagaatggggagaaggtcttgaaatcaattattttttctttctggatttttccaagttctacagagcgaaggctccaaagaagacagtactagggctgaggactaggtgggggatgccatctgtgtgggtggatagctggtctccctgggtgagctggaacgcagccccgtggtacatcgagtgcagccagggttcctgcagccctggatacaccatcttctgggagctgaggagaggcacatggaaggggtactgggaggagaagagctggacctcatgggccaggtagagtggggaggaggtggccttgggagagtaggctttcccagagaagaccacctgggagtagacgaagtagatgccactggtggggaccaggagagaattgttgctcaaggagaaaccatcctggaggaaggcacggtccgtgtttgctctccagagcagtgagttctgcttgctggggtctcctaggaagagccataggggatgggggtgggagatcaggggtctggatcagaggtctcaatccctgaggaagtgggcactgaacaactgagttcctgggggatggcagggggaggcataggagtgggctccctctgttttttttagcgtgggggaagttgggggagaggggtggatgcttgggttcctgaggcaggggtaggaggagagctggtggggacatgtctgggaggtcaggtggatgtttaccaatgaggtgagcagcaggtttgaggttgctgtgggcaagatgcatcttggggtgctgacgggcagtctgggcagctgaaggtgtgaggccaacaccagggagcccctaggggagaacagagttgaggggggctctagggctcaaggtttggctgagccaccccagcagcccccattctcctgctgcctcacctgggccccaggcagcagaaccagcagcagccccagaaggaggaggtgtagggtggtgccacacacccttgggaggaagagacgttcaggtggtgtcatggggagaacctgcagagaaagagagagagagagagagacagtgagcggggcggggcacgcggcggaagacagacctcccgccctgggagacagcaccccccgacccccgagagagagatcgacagagaaggggacaagatgcagtcagagaaaccccaaggtgagcagagggagacagagagagacaggaagggaacagagaggaaccatggcagaaacagagaatgtgtgacagagacaatgagactgacagatggagagtcagagacagagaaggaaaccaaaaccaaacccaccaaggcccaggcccaggcaggccggggatccaggcagcaggtgcaggagggaccgaggcccaggcagagggcaggacactgcggggcggtagtccaaagcacgaagcacgggcagcccaaggagatggggcaggagagcctcacctgctgtgtggagcccctgggcccggacgctcaggtccctttatagaggaagcggcagtggcagcgtggcaggcagcgggcgggttctaggtcggggctggggcccggggaagcccccagggcttagaagatactgctgtttcagtcaaaggcaggaaaggctgaggcctaggagagaaccacaggctgggggttcaggcgactgagttctgggaaagggagtcgggtcaggggaatcgtgggctgggagggccagggagtggggtcaggcctagagttccaaagaagggacagtcaattcagagaggaggcggttgagcagctggggtgtgagctggaggcccggttccctgaagagcaatcatatataacatctctgcacccttggctgagtacaggcttctctctttgcccatttccttctcttgtacccctgtccttgtcccaaacaactcaaatcatacttgtcccagtatacggactttccagcccatctggcaggtttcacatcaagaaggtccattatatatccccttcatcggggacattctggtgtttgcctcttgtccaggtgaaaatattaatggatcccccttccactcttgaaagtgtcctagtttggaagataaattttttggtccccttactcagagatgatgctggacagtcaagtatgatgaggtctcatctcactcctgaaggatgccctccatctcttcctgacttcaggtggcttccacagaacagatttatataaccccaaataaacacacattccaggatcaatgtggcagacaccttccaaagttttctacaaaggaagtttcagaattccacatgggtgaggcttaagggtggtgacttagggtggggtggggacagctaagggacttgttctgaagctgcatttgcagagccaatacattattttaaaattgttccaggcctggtgcagtggctcacacctgtaatcctggcactttgggagtctgaggtgggcggattacttgaggtcaggagtttgagaccagctggccaacatggtgaaaccccatctctataataaatacaaaaattagccaggcgtgctggtgcgcatctgcagtcccagctactcgggaggctgaggctggagaattatttgaacctgggaggcggaggctgcagtgagtcaagatcgcaccactgtattccagcctgggggacagagcaagactctgtctcaaaaaaaaaaaaaaaagtttccaaaatttttttcctttttattgatatgtaacttaggtatgaggtggacacctcttaagtgtacagctgatgaatttttccatctgtatgtagccaccacccagctccacgtattttcaggtccccagcaggttccctcatgccccctccctgctgataccctccaaagataaccaaccactctctcacttttatcaccatagattatttcctcctggtttggggcatcatataaatgaaatcacacagaatgtactcatttctgtttgacttctttcagtcagcattatgtttgtgagattcatatacgtggttgtatgtatcagtaatgttttttaaaaaaattatgatgtaatattctattgtatcaatatattctaatatattctgttgatggggatttggtttgtttctagtttttgtctaacacaaaaaatgtctaacacgaacattctcatacatgagcccattttcacttagcttgcaagttacaaggtttaaaaaaagcagtttctaaagatgactttattcacttttcctaagtttgagataataccaacttgtcacctcaaatattattactgctactgatgtgattttacttggagagtgttagaggggttggagctggggctggtggtgacccggggtaaagcccactgttgcatggggcagaccacttctctccccaggcacaaggtccctgaggggtcttggtgtaacatggagggacatgtaagtaacattctgggtgtgtatgagctatttctcctgttcttctctacttgaggacctgcccctttgccttttatgctttactagtcttagctattatttctgtaggggcagaaaggggtgatcccttcctgacccatcataagggttatggccaatactcctataataaaagacagattaacaagagaaaagcataatacatttatttaatcaaagttttaggtgacatgggagccttcagaaatgaagacccaaggacccaggggaaaactatttttatgcttagatttgatgaagaatgaacagctgtgcagaaatgtaattgaacaaaaggagtatcatctaatggtcacagactgggactggggggatcccagcaaggcctggccatattcttcttggtctctctgtacagcattccttcctcccaggtatagggcagaacctcttctggaatgagggtcttataacctactatcagatgagataggtcagaaaatttcttttcctttttttttttttgagacagtttctcactgtcgcacaggctggagtgcagtggcacgatcttggctcactgcaacctctgcctcccaggttcaagctattctcctgcctcagcctcccgagtagctgggattacaggcacacgccaccaagcccgccaaatttttttttgtatttttagtagagacggggtctcaccatgttggccaggttggtcttgaattcctgaccacaggtgacccaccagccttggcctcccaaagtgctgggattatgggcgtgagccactgcgcccaaccttcttctcattcttttaaccttattatctcttgtgtcagtgtgggtttcccttttagcccctgctcctttctttttctctgtgttgccctttctctcagggtcctttttgcttcctgttgtctctttctgcttctctaatggtatgagctgatggactgggaccccagctgagctatattaaaatataaaatgttattacaaggccaggagcagtggcacatgcctgtcatcccagcactttgggaggctgaggcgagcagatcacaaggtcaggagatagagacaatcctggctaatacggtgaaactccatcactgctaaaaatacaaaaaattagccgagcatggtggcacgcgcctgtaatcctagctactagggaagctgaggcaggagaactgcttgaacccaggaggcggaggttgcagtgagccgagatcgtgccactgccctccagcctgggcaacaaagtgagactccatttcaaacaaaccaaccaaaaaacaaaacaaaacaaaacaagcaaacaaaaaaaggtattgcaattaacagtgagacacagagagaaatttaaattaaagaggaagaatgggacattgaaagacaaaaaagggaaggcaagaagggtgatggggagacatgagagacacagaggaaggaagggtaagactgggctgaggctcagtgtcacgtgcatgtgagatatgcgaaggatgctccttgagatgggccaatcttggtttcaatctcagtttcggaggttgtatgaatttggtttctttcttgggcaggccagcagttggtttgggactttccctgggtgggagagctgatgactggagtcttgtgccccagactcagggaaatacagtctttatagtggtctttgtggagaaactagtgaaatctctgaagcctccaaatgagactgaaatgacattagcttcaaacttgaacttagcctcaaaacctgaattgggatttaataccaacatcaaccctaacccaaatttaacctcaacccaaatcacaactcaaactcaaccccaactgtaaccctaacctcaaatctaaacacatcccaattaataaccccctaaataaaacttctcctctaccccaacccaaccctgtttctagggctaatcttgaaaccagtttaccaccactcctaacactaaacttaaatctgactctaaatgtaagtccaatctgagccacaagcctaaagttgaactttatcctgctttatgaattattcatccattcctccatttagtgagtatctgcgtgcctaacacatgctgggcattgtcctaaggcaggagggacatggaggcaaagggatcagagaaggtaccagcacctgtggagcttgtattccagtgaggccagacggaaaagaaagaaactgaagaagaaattggtactatgagaaaataagacaggctgatgttgtaagagtggcagggagctacttttaaatacagtagtcagcaaaatcctctttgagtgtttgggtggcactggagctgagacccaaatgacaaaaaatagtgaccaggtaaaagtttgggagcaaagcatttcaggtaaagggagcagctactgcaaaggctggaaggcggaaccaagctgggggtgttgacgacaaacagaaggccagtgtggctggagcagagagagagactgggaggcgggtgggagatgaggtcagagaggagggcaggggccaggtcatgcagggccatgcaagaagggtaaagcctctagatttcatccagccacaggaagcctttaaaggtcgtcagagtgtgtggtgcgtgcgtgtgtgtgtgtgtgtgtgtgtgtgttgcaggggagagagggggagggagagagagagagagagagagaagagggaggtgagcagaggtgattggatttttttttcttttgacatggtgtcttgctctgtggcctaggctggagtgcagtggcaccatcatagcccactgcaacctcaaaaccatgggctcaagtcatccttccacctcagcttcccaagtatctaggactacaggtgtgtgccactgtgcctggctaattttaaaaaatattttaaaatttttgttgagacagggtctatgctgctcaggctggtctcgaactcctggtttcaagtgatctgcccatcttggcctcccaaagtttttttttgttagtttgagaggcggtttcgctcgttgcccaggctggagtgcaatgactgatctcatctcactgcaacctctgcctcctgggttcaagcgattctcctgcttcagcctcccaagtagctgggattacaggtgcatgccaccattcccggctaattttttgtatttagtagagatggggtttcaccatgttagtcaggctgatctcaaactcctgacctcaggtgatccgcctgcctcagcctcccaaagttttgggattacaggtgtgagccaccatgctgggccagcctcccaaagttttgggattacaggcatgagtcaccacactggccctggattttttttctttcttttttttggagacggagtctcactctgttgcccaggctggagtgcaatggcgtaatctcagctcactgcaacctctgctgcccgggttcaaacgattctcctgtcttagcctcctgagtagctgggattataggtgcatgccaccatgcctggctaatttttgtacttttagtagagaaagtacaccatcttggccaggctggtctcgaactcctgacctcaggtgatccacttgcgtcggcctcccaaagtgctgggattacaggcgtgagacaccgcacccagcctttttttttttttttcttttaagacagaatcgctctgtcacccaggctggagtgcagtggcacaatctcggctcactgcaacctctgcctcccaggtttaagcaatccacctatgtcagtctcccaagtagctgggattataggtgcatgtcaccatgcctggctaatttttgtacttttagtatagaaagtacaccatgttggccaggctggtcttgaactcctgacctcaagtgatccgcctgcctcagcctcccgaagtgctggaattacagacatgtgccactgcacccggcctggttttttttttctaagagatggagtctcacttttctgcccaggttggagtgcaatggcaccatcatagctcactgcagccttcaactcttggcctcaggcaatccttgcaccttagcctcgcagtgttgggattacaggcatgagccactgagccttgcctggacttttttttttttttgagatggcgtctcgctctgttgcccaggttggagtgctacggcatgatcttggctcactgcaacttccacctcccaggttcaagcgattctcttgcctcggccccccgagtagctgggattacaggcatgcgccaccgtgcctggctaattttggtatttttagtagagatagggtttcatcatgttgggcaggctggtcttgaactcctgacctcgtgatccacccacctcggcctcccaaagtgctgggattataggcatagccaacgcgcccagcctggacttgtttttaaaagatcactgtggctcctgtgtttaggctggctggtaggagacaggtggcagtggcattgatggtgaagagaaaatagtggcagccatggagatggagagaagtagacaagtttgggatatattatacattccaggggtagaaacaacaggactagatgatggattgatgggtgggagatgtagatactgggagagaagcaggattctgatggatggaaaaactaaaaaattctattttgggtgtggtaagtctaagtctattagacatgcaagtagagatgtcactgggcagatacacatctggatttcaggggcaaggtccaagctagagaaagaaacctgggcatggtcagcatgaggatggtgtttaaagccatggaacttatcttgtgcatccctataagacccctttgaggcacttgtttcccctcacaatggatgcagtgcatcttccattctgaattccagaggcaacaacctcctgctcctagaagctaaactctccagacttagtcttctgaattc

SEQ ID NO: 790 - DNA, 584 bp, Homo sapiens
tgtggatgaacaccacgtacatgccgtaaatgctccctaggctggctgcggctacaaggcagacccgggagctgagaatagaggaatacctgcccaagcaactcattctgcacagcagccgacaagacagcgattttcctgtgctggaatgtgcccatccaaagacacttggattggacttaatcttaaacctctggagttcaagaccttttaaaaagggctaaataaacaatctctacatgtaaaaggccactgactcctacttcctctgtatagagcaactgttgaactcagctgcctgtaggtgcatttcctgtccatttcagaagctaattatgaaatggccacacaactggatgtttctgtttataaaatagtgttccttggaggggcttgcaacatctaaatatcttatgtcagaataaaagccactgagatccaaagaagtggactaaacttgacaatatctgaaagtcttctgctggaccaggaacccctacagtggacagtgtgcttcctgcttttccacgcagttcgacaggaaaaccatcccaaagtgaacaaaatggaagctgcgaagttca

SEQ ID NO: 791 - DNA, 5399 bp, Homo sapiens
gccgcgcgggagagcgggagcctcggccctccgcgcggctgcagctacctaccctgcgcccggccaggtccccgacttagggatggcaaacttgcgccccgtggccgcccccgccagcgccggcccccgctcctgctgctgacggcgcccaggaaatccacagcagtgatacatgtgacgtccacactgacagtgccctcctgtgggcatggctcaggttgtgcgcagttcctggcacactggctgtaactccgcccctttctctccctctcagtaaagcaagattacgcggtgacatgcctcacagctgatcacgacacacggggatggagagcaagagttatggagaatacaggttggatgggcaagggacataggatgaccccagcctgtcccctcttactgtctgtgattctgtccctgcgcctggccaccgccttcgaccccgcccccagtgcctgctctgccctggcctcgggtgtgctctacggggccttctcgctgcaggacctctttcctaccatcgcctcgggctgctcctggaccctggagaaccctgaccccaccaagtactccctctacctgcgcttcaaccgccaggagcaggtgtgcgcacactttgccccccgcctgctgcccctggaccactacctggtcaactttacctgcctgcggcctagccccgaggaggcggtggcccaggcggagtcagaggtggggcggccagaagaggaggaggcagaggcggcagcggggttggagctgtgcagcggctcaggcccctttaccttcctgcacttcgacaagaacttcgtgcagctgtgcctgtcggctgagccctccgaggccccgcgcctgctggcgcccgctgccctagccttccgctttgtcgaggtcttgctcatcaacaacaacaactctagccaattcacctgtggtgtgctctgccgctggagtgaggagtgtggccgcgctgccggcagggcctgcggctttgctcagccaggctgcagctgccctggagaggcgggggccggctccaccaccaccacatctccaggccctcctgctgcccacaccctgtccaatgccctggtgcccgggggcccagccccacctgctgaggccgatttgcactcggggagcagcaatgatctgttcacaaccgagatgagatatggtgaggagccggaagaggaaccgaaagtgaaaacccagtggccgaggtctgcagatgagcctgggctatacatggcgcagacaggcgacccggcggctgaggagtggtccccgtggagcgtgtgttccctgacgtgtgggcagggtctgcaggtgcggacccgctcctgtgtgtcctccccctatgggaccctgtgcagcgggcccctgcgggagaccaggccctgcaacaattcagccacctgcccagtgcacggcgtgtgggaggagtgggggtcctggagcctgtgctcccgcagctgcgggcgggggtcccggagccggatgcggacctgcgtgcccccccagcacggcggcaaggcctgcgagggtcctgagctgcagactaagctctgcagtatggctgcctgcccggtggaaggccagtggttagaatggggtccctggggcccatgctccacgtcctgtgccaatgggacccaacagcgcagccggaagtgcagcgtggcgggcccagcctgggccacatgcacgggtgccctcactgacacccgggagtgcagcaacctcgagtgcccggccactgatagcaagtgggggccatggaatgcgtggagcctgtgctctaagacgtgtgacacaggctggcagcgccgcttccgcatgtgccaggccacgggcacgcagggctacccctgcgagggcaccggagaggaggtgaagccttgtagtgagaagaggtgtccagccttccatgagatgtgcagggatgagtacgtgatgctgatgacgtggaagaaggcagctgctggcgagatcatctacaacaagtgccccccgaatgcctcagggtctgccagccgccgctgtctcctcagtgcccaaggcgtggcgtactgggggctgcccagctttgctcgctgcatctcccatgagtaccgctacctgtatctgtcacttagggagcacctggccaaggggcagcgcatgctggcaggcgagggcatgtcgcaggtggtgcgcagcctgcaggagctactggcccggcgcacctactatagtggggacctgctcttctctgtggacattctgaggaatgtcactgacacctttaagagggccacctacgtgccctcggctgatgatgtgcagcgcttcttccaggtggtgagcttcatggtggatgcggaaaacaaggagaagtgggacgatgctcagcaggtgtcccctggctctgtgcacctgctccgtgtcgtggaggacttcattcacctggtgggcgatgctctcaaggccttccagagctctctgattgtcacagataatctagtgatcagcattcagcgagagcccgtctcagctgtgtccagtgacatcacgttccccatgcggggccgccggggcatgaaggactgggtgcggcactcagaggaccgcctcttcctgcccaaggaggtgctcagcctctcctccccagggaagccagccacatctggggcagcaggcagccctggcagggggaggggcccaggaacggtgcctcctggcccaggccactcccaccagcgcctcctcccagcagaccctgatgagtcctcctactttgtgatcggtgctgtactctaccgcacccttggcctcatcctgccgcctcccaggcccccgctggccgtcacatcccgggtgatgacagtgactgtgcgcccccctacccagcctccagctgagcccctcatcactgtggagctctcctacatcatcaatgggaccacggatccccattgcgccagctgggactactccagagcagatgccagctcaggagactgggacactgaaaattgccagaccctggagacccaggcagctcacacccgctgccagtgccagcacctgtccacctttgctgtactagcccagccgcccaaggacctgaccctggagctggcgggctccccctcggtccccctggtgatcggctgtgcagtgtcgtgcatggcgctgctcaccctgctcgccatctatgccgccttttggaggttcataaaatctgaacgctccatcatcttgctgaacttctgcctgtccatcttggcatccaacatcctgatcctcgtgggccagtcccgggtgctgagcaagggcgtgtgcaccatgacggctgccttcctgcacttcttctttctctcctccttttgctgggtgcttaccgaggcctggcagtcctacctggctgtcattgggcggatgcgcacccgcctcgttcgcaagcgcttcctctgcctgggctggggtctgcctgccctggtggtggccgtgtctgttggctttacccgaacgaaaggatacggtacatccagctactgctggctctccctggagggcggcctgctctacgcctttgtgggccctgcagccgtcattgtcctggtgaacatgctcatcggaatcatcgtcttcaacaagctcatggcacgtgatggcatctccgacaaatccaagaagcagagggccgggtcggagcggtgcccctgggccagcctgctcctcccctgctcagcgtgtggagcggtccccagccccctgctcagctcagcctcggccaggaacgccatggcctcactctggagctcctgcgtggtgctgcccctgctggcgctcacctggatgtctgccgtcctggctatgacagaccgccgttccgtcctcttccaggccctctttgctgtcttcaactccgcgcagggctttgtcatcactgctgtgcactgcttcctgcgccgagaggtccaggatgtggtgaagtgccagatgggggtgtgccgggctgatgagagcgaagactcccctgactcgtgtaagaacgggcagctgcagatcctgtcagactttgaaaaggatgtggatctggcttgtcaaacagtgctgttcaaggaggtcaacacttgcaacccgtccaccatcacgggcacactatcccgcctgtccctggatgaggatgaggagcccaagtcctgcctcgtgggccctgagggcagcctcagcttctcaccactgcctgggaatatcctggtgcccatggcagcctcaccagggctgggggagcctccgcccccacaggaggccaaccctgtttacatgtgtggggagggtggcctgcggcagctggacctcacatggctgcggcccactgagccaggctctgagggagactacatggtgctgccccggcggactttgagcctgcagcctggcggtgggggtggaggtggtgaggatgcccccagggcccggcccgaggggaccccccggcgagctgccaagacagtggcccacactgaaggctaccccagcttcctgtccgtggaccactcgggcctggggctgggccctgcctatggatctctccagaatccctatggaatgaccttccaaccgccaccgccgacacccagcgcccgccaagtgcccgagccaggggagcgcagccggaccatgcctcgcaccgtgcccggctctaccatgaagatgggctccctggagcgaaagaaattacggtattcagacctggactttgaggtgatgcacacccggaaacggcattcagaactctaccacgagctcaaccagaagttccacactttcgaccgctaccgcagccagtccacggccaagagggagaagcggtggagtgtgtcctcgggtggggcggccgagcggagcgtgtgcaccgataagcccagccctggggagcgccccagcttgtcccaacatcggcgccatcagagctggagcaccttcaaatctatgacactgggctcgctgccccccaagccccgagaacggctgactctgcaccgggcagcagcctgggagcccacagaaccaccggatggtgacttccagacagaggtgtgagtgccacgctggactgcccactgcatataaatatatatatctctctattttcacactccactttggaactacccaggagccagcgccctctcccctctcccgagggctgggcagggaggcgccgtggactcagccaggctgggggagccggacatggcttggcctggggtcccagggcccttccttgtttctcagaggcccctcagccactggaaccccatcttcagcccagcctgtccgtccctgtcccgggctggggaggggggaggggaactttgttgggaataaacttcactctgtgg

SEQ ID NO: 792 - DNA, 1502 bp, Homo sapiens
gccgcttttttttttttttttttataggttcttttaggtttttattatgatctcttgtttttatacctgaataacaattttccccaaaggaatgatgatatgtaatctttattctaaaaaggacacatagtgtattgatagcatctggtcagtggttatcactgactatcttcaataacaattactcatctaagaaactcttccttttttctttaaaatcgttggtgctgatccagacaagccctgggctgctgctcctcatcctgataggatctagcttctagactgacccctctcaagaacaaaatacagggagggacttgttctggattccctttgggcaaatgcagctgcaatactcagcaggcttggcctcaacttccagggcttttgttttttttcttttaaatgtatactattaaagttggattattaatctaatatttgtgtttgccttggggactaataaacctcacaacctgaggatcacctcagttaaaccaaggctttgtcatcacagagctactcagcagaggtctgtctcagctgttccttgaactaaggaaggagtcagtcagctaggagagaaaagtccttttgaaagcagacagcatcatgtaccttgctgactcagctacatacataaggcctcaagccttgctgccagttcttaaaggaactgtgttctcttttcacttttcctggcttatggggcagtagagggtttccgacctcaaatgccaataccaggtaggtagaaggaccttaggctcaactgctggctcctcgtaataacacacactgtattctgtggtgggtgccactctgctctgcctgtgtcatgtcacctttcctaatccagcacatcctcgcccaagaaaaccctattttggggtcattcattctattcttatttctctcttatttgttctgatgtttcagttggacttgattccaccgcaggctctggctccagaggaagagatgggggctttgtgaactgggatgttcctccagcacctgaggggagcgtcctgtatgcagctgctgaagacattgcctgtcctagagcttgattagagcccagaggctgctggaaactggcaggtttgctggttgaagtggtctggtgctttgatttgggatctttaactggtttggtccagaccagtgcctccccaacctggagagcagctcccaacttctgagccatctccaccatctcagagtcaaattccagagagctattgtccttgagtaggctgactttcttctccatctcctgatattgggccagggcgttcttcttctcgccctggttgtacagcagcacagcatagttcacgtttactaaagggttacacttatccaggtggactgcttctgcgtaggctctcttggcattttctgtatcttccagattggtcagagccactgccaagagcatgtagagctcccccatctttggctggaagttgatggccgcactgagaaaaaaaaaa

SEQ ID NO: 793 - DNA, 479 bp, Homo sapiens
tcattcattagaatcacgtaagaactcaaaaggaaacgtgtctctcggagtgagggcgtttgcgtaaatctataggtttttcgacatcgatgccagttgctttgtcttctgtagtcgccaaggtggttgagagtttaagcttgcggatattgcaaagggttattagattcataagtcacaccaagtggtgggcgatccactgagcaaagccgaacttctcacatgatgacttcaaacaagacacattaccttccagcatctgttggggagacgagattttaagacacttgagtctccaggacagcaaaggcacaatgttccaccaggtgagaagagtgatgaccatccttttccttactatggttatttcatactttggttgcatgaaggctgcccccatgaaagaagcaaacatccgaggacaaggtggcttggcctacccaggtgtgcggacccatgggactctggagagcgtgaat

SEQ ID NO: 794 - DNA, 5680 bp, Homo sapiens
gaagaactttggccatggctgacagaaacacaatcaatcatctctcagcttcccgccccagcccttgaatatgaaactctaaggcagcagcaggaagaacatcggcaactgcgtgagttgatagctgaacacaagccacatatagataagatgaacaaaactgggccacagttactggaattgagccctggggaaggcttttctatccaagagaagtatgtggcagccgacaccctttacagtcaaattaaagaagatgtcaaaaagcgtgctgtggcactggatgaagccatttctcaatcaactcagttccatgacaagatagatcagatccttgagagcctggaacgcatcgtggaacgtctgaggcagccaccctctatctctgcagaggttgagaagatcaaggaacagatcagtgaaaataagaatgtgtcagtagacatggaaaagctacagccgttgtatgaaactcttaaacagaggggagaggaaatgattgctagatctggggggactgataaagacatatctgccaaagctgttcaggataagcttgaccaaatggttttcatttgggagaacatacacacactggtggaagagagggaagccaaactactggatgtgatggagctagcagaaaagttctggtgtgatcacatgtcattgatagttaccattaaagatactcaagatttcatccgggacctggaagatcctggaattgatccttcagtagtaaaacaacagcaagaagcagcagagaccataagggaagaaatagatggactacaggaggagctggatatagttattaacctaggttctgaactcattgcggcatgtggggagcctgataaacccattgtcaagaagagtatagatgagttaaattcagcatgggattctctaaataaagcttggaaagaccggattgacaaacttgaggaggcaatgcaggctgccgttcagtaccaggatggactgcaggcggtatttgactgggtagatattgcaggtggtaaattagcttcaatgtctccaattggaacagatctcgaaactgtcaagcagcagattgaagagctaaagcaatttaagtctgaggcctatcaacagcagatagaaatggaaagactgaatcatcaagcagagcttttgctaaagaaagtaacagaagagagtgacaaacacactgttcaagacccattaatggaactgaaattgatatgggatagcctggaggagagaatcatcaacagacagcataaactggagggtgctctattagccttgggtcagttccaacatgccctggatgagctcctggcatggctgacacacaccgagggcttgctaagtgagcagaaacctgttggaggagaccctaaagccattgaaattgaacttgccaagcatcatgtgctccaaaatgatgtattagcccatcagtccacagtggaagccgttaataaagcaggaaatgatctaattgaatcaagtgcaggagaagaagcaagcaaccttcagaacaagctagaggttttaaatcaacgctggcaaaatgttttggaaaaaacagaacaaaggaagcagcagctggatggtgccttgcgccaggccaaagggttccatggcgaaattgaggatttgcagcagtggctgactgacacggagcgtcatctgttggcatctaaaccgctgggaggtttaccggaaacagccaaggagcagcttaatgtccatatggaagtctgtgctgcctttgaagctaaagaagaaacatataagagtctgatgcagaaaggccagcagatgcttgcaagatgcccaaaatctgcagagacaaatattgaccaagacataaataacttgaaagaaaaatgggaatcggtggaaaccaaactcaatgaaaggaaaactaaactggaagaggctctcaacttggcaatggagttccacaattctctccaagacttcatcaactggcttactcaggctgaacagaccctaaatgtagcttctcggccaagtctcatcttggacacagtcttatttcaaattgacgaacacaaggtttttgccaatgaagtaaattctcatcgtgagcagataatagagctggacaaaactggaacccacctaaaatattttagtcagaaacaagatgttgttctaatcaagaatctacttatcagtgtacaaagtcgatgggaaaaagtggttcaacggttggtagagagaggaagatctttggatgatgcaaggaagagagccaagcagttccatgaagcttggagtaaacttatggagtggctagaagagtcagaaaagtctttggattctgaactggaaatcgcaaatgatccagacaaaataaaaacacaacttgcacaacataaggagtttcagaaatcactcggagccaagcattctgtctacgacaccaccaacaggactggacgttctctgaaggagaaaacctccctggctgatgacaacctgaaactggatgacatgctgagtgaactcagagacaaatgggataccatatgtggaaaatctgtggaaagacaaaacaaattggaggaagccctgttattttctggacaattcacagatgccctacaggctctcattgattggttatatagagttgaaccccagctggcagaagaccagcctgttcatggagacattgatttggtgatgaatctgatcgataatcacaaggccttccaaaaagagttggggaagaggaccagcagtgtgcaggccctgaagcgctcagcccgagaactcatagaaggcagtcgggatgactcctcctgggtcaaggtccagatgcaggaattaagcacacgctgggagaccgtgtgtgcactttctatatcaaagcaaacacggttagaagcagccctgcgtcaggcagaggaattccactcggtggtacatgccctcttggagtggctggctgaggcggagcaaaccctgcgtttccatggtgtcctcccagatgatgaggatgctctccggactctcattgatcagcataaagaattcatgaagaaactggaagaaaagagagctgaactaaataaagccaccactatgggcgacaccgttttggctatctgccaccccgactccatcactaccattaagcactggataacaatcatccgggcgaggtttgaggaggtgctggcctgggcaaagcaacatcagcagagattagcaagtgctctggctgggcttattgccaaacaggaattgttggaagctttgctggcttggttgcaatgggctgaaactacacttactgataaggataaagaagtcatcccccaggagatcgaagaggtgaaagcactcattgcagaacaccagaccttcatggaggaaatgaccagaaaacagcctgatgttgataaagtaacgaagacctataagaggagagctgctgatccttcctcattacaatcccatattccagtcttggataagggacgagcaggaagaaaacgctttccagcatcaagcttgtatccctctgggtcacagacacaaattgaaaccaaaaatcctagggtaaacttactggtgagcaaatggcagcaagtctggctcctggcgttggaaagaaggaggaaactcaatgatgccttggacagactagaggagctgagggaatttgctaactttgattttgatatctggcgcaaaaaatacatgcgatggatgaatcacaagaaatctcgagtgatggacttcttcaggagaattgataaagaccaggatgggaaaataacgcggcaggaatttattgatggaattctttcctcaaagtttccaaccagtcgcttggagatgagcgcagttgcagacatctttgacagagatggcgatggatatattgactactatgaatttgtagcagcccttcacccaaataaagatgcatataaacctatcacagatgccgacaaaatcgaagatgaggtgacaaggcaggtagctaagtgtaaatgtgcaaagcgatttcaagttgagcagattggtgataataaatacaggttcttcctgggaaatcagtttggagactcccagcaactgcgactggtccggatcctgcggagtactgtgatggttcgtgttggaggtggatggatggcacttgatgagttcttagtgaaaaatgatccttgcagggccaaaggaaggacaaacatggaactgcgtgagaagttcattttagcagatggtgccagccagggtatggctgctttccgaccccgaggccgaagatcccggccatcatcacgaggcgcttcacccaacagatccacttctgtgtccagtcaggctgcgcaggcggcctccccacaggtccctgccaccaccacacccaagattctccatcctttaacacgcaattatggtaaaccatggttgacaaacagcaaaatgtcaactccttgtaaagcagcagagtgctcagactttcccgtgccatctgcagagggaacgccaatacaaggaagcaagcttcgacttccaggatatttatcagggaaaggcttccactctggggaggacagtggcttgataacaactgcagctgccagagtccgaacacagtttgctgattccaagaagactcccagccgaccaggaagtcgagctggaagcaaagctggcagcagggccagcagccgccgaggcagtgatgcatcagactttgacatttcagaaatccagtccgtgtgctcagatgtggaaactgtcccccagacacacagacctacaccccgagcaggttctcggccatccacagcgaagccttcaaaaatccccacgccccagaggaaatcacctgccagcaaattggacaagtcctcaaagagatagtgcaattggttctaccaaggcccttccttgagcatttattatttaagtttgaacgatgtaaaatatggtgtagaaattcttgtgaaatattgcaagaggcgagtttaaaattctgcagatggccttatttgtgtatttgtctttttattttatctgtataattttttttgtcagatattctggggttaaagtcacatcatatgtgaggaggaaaagtttaacatgaactaacatttctgcactgtaacgtgccgggcacacactaaactcagttactgtacctacaggtaagtctacatcctctctgacagccacagcactacatcaatccctgacgttagggatacctcatgacattttcctgtttttatggaaactctgagaagctgaatgatacatgcaggggatattttttgagatgatttaaatgtaaaccaaaagatggaagacaaaaagacaaacacacccacacgcagtctttgcagtatctgacagagaactcacaggaagttacttcaagcacttgccagtactatgatattcaagtaccttgcagcatttctctgccattgctttcaatgaggccagaggcatcctggatattagacctattatactgtaagaatataagtataaagtgcgttcatatacatgtgaggttttcttttgcttgagtggacagtagcacctgtatcattgaactcattttgtatcagagcaattttgcttgcagaaagctatgaaataaaacacgtcccttaactgc

SEQ ID NO: 795 - DNA, 26060 bp, Homo sapiens
gatctttctgagtgtggcttgataaccagctgcagcattttgcaaagcacccagtggactcgggtgtgatctgcagaggcggctgctggccaggcctggagtctggggcagagggagtgccctcagtgcacctgtgaggacctgggactaagagtcggtacctgggagctgtgggactctggggcgggacggccttagcctccgtgtgagcactgaccgagatgaggcacagatgcatctgtgtgaggtgcccggcccctgcaggagtgctgagtattgtagctataacctgtcatgtggcagaaggaagaatctactataagcggctgagaggatgccctccctgtgccatgcgtcactggagccttggcctgacaatcccacaaggagcaaaatgtgcaaaggggcagctgtgtgagcctgcgggtccagggtgccacccgcccccatctgcccacaccacaggacagagccctgggtatgctgaccaggccctcgctggtaccaggggctgggtaggaggcaagggtcaagcacggtggctccgtgggctgtggactcacagacagatgtgctgcatgcccgcgctttgctcttagctctgcctccggtctgtcccggcaacaggcctgggggcgtcctgcagtcctcggcatttgtggttgggggtgagcagagaacatagacgaaataaccaaggggatggtctgagagctgcggccctgctggccccttgtcctggctcggcatggctgagtgggacagcagtgaggccaggcctgtctcctggggccggggtgttttgtgagtttggttcttgtcaggccggctgagaggagatggagcagacagatggatgctaggtgggcctgccgcagctttgttttaggaagtgcggagcaccagggcctgaccctgaggctgtgtccctctaagagcacggtgtctccttccctctaaagggccaggtgctgtcctcactcactgcccctctgaagagagtcccctgcctgagtcgtggctctcctgcccttcccagacccgtgggagaccctgactacgtggcggtggcctggggttgggagggcctgaccagtgtctgtggggccaacttcctcgttcccagcatgtgtggagggtcgggcctcctcacgcgcctcatgagggtcccacgggggtagagcgtcctttgagtcctctctattcgaggagtgggtagagaggcgggtagggacggagcttggaagaggtgacgggttgtggccagaaggctgtgggggcgtcatggcaggaagggaaaccttcggagaggccgctcacccagggccgtggggccatggagaagcacaggccctgggttcagaaagcaggaggcatatgaggtcttaggtctagaaggcactggtgggtgcagagtggggagaactgtggggtgcaggggacagtcacgggagaggcagcgctggcagctgcacctgcccagcgtgtctggggccatgccccaggatagccccaccagtctgctgaagcgccccgggacagggctgggcctgtagagccgggccctccaggcggccaggcagctgcaggagagcaggtgcgctgtgcatggggggctcacagcactgggcagatccccctggggagtaggcgccagggctggccgtgcctgcttgggtggggcccacgatgcccagctgccctccccagggctcctccagggctacagggggcccccaacccccgacttctcccctggctccatagaaggaagcagttggctccgtctgtcactgaaggcagccctgccctgacagatccagtttcccgagtcctggagggtggccgctggtcaccacgtgggccggggaggcccctctggccgcctggggacaggtgctaggttggccgggttagatggggctgtgggggcagcaggctgggatcccttctcacagactcagctccctcctgccacagccgatcacagcactgctcccagcattatcccgagaattctggggctgtggggtgttggcggtgagtctggcatggatgtccagctttgttcaagctggctctggccttctctgcctgggcgacgttgtgccccttcacctctgagcgtcccctccacttatggaagatggggctcatctgacccccactgacgcaggacagagtccaggagacgggctggagtgccccagtgggggccatccagtcagggacacaggtacagaggcccagagctatggaaattccagggctggagacccatggggaatggggagcccctgggaaaggcctcccctagcttcctccagcacccccacccttggttccagtgctcctgtctcccaccctttagctggcaggtctggttgagcccctgcagagctatgtagccctgcccctccctgccactgctcctccagactcatgctatagctggaatggccttggtaagctgtcctcccaaccctgcctgtttgctgaaagctgggactccccatccctggaccccaaataaggactttttgctctgggcccaggccaggctggagatgcccccatggtccagccgctgccccttggctggtttgccccagggtgtggcattggaggcagcacccctctgtcctccctctgtggagtgcctgaaggctaggctgctgtgctgcccaggcgacatgcctgctcctgcccctctgggtctctgctccccaagagggccatggaatggcaggaggggtcagggagactgctactggcatttctgggtgttttctttggtggcaactggacagattcccattccctccccgtttgtccacagccctgaaacagccctggactcagcatcttttctgatgaattctgggctgggccagcctaaagggggctgaatttctgcttttcattcaggtcctcctgtgccctatggagaggaaggcagagtccagggaccttgggaagggttcagggggccacccacagcttcagggccagaggtgggcctgcctggggccacacagcaagggtgaggataggtaggattcgggccacctcaccaacattccttccatgtccagcacagagcctctcttggatggggcatgagtgggacccaggaagggggctagtcagtgttaggggagcctggccactgccctctccccgctggctactttggaaatctccatggcattccagattgtgtgtgtgtgtgtgtgtgtgtgtgtgtgtgtgtcagggtcttgctctgacatccaggctggagtgcagcagtgcgatcacagctgactgtatcctcaaactcccaggctcaagtgatcctcccacctcagcctcctgaatagctgggattctaggtgcaccaccaggcctggctaatttttttaaattttcgtagaatcagggccttactatgttgcccaggctggtctcgaactcctggtttcaggggattctcctgcccctcccaaggtgctggggtcacaggcctgagccactgcgcatggcctgggtctttcttgaggatttcaccagacccactcactgctgggttttcgcttggcgttcgaggacttttgtggtttgtctgagtttcctctctgggcagtttcggatcctcttgtgtctaaggcaggctgcctgctcactccgacttttacccgactggcaagggtggcctctgcctctgtctctgctgggcccggcaggcagtgcctgtgggctctctagcatgggctttgtgggcagctgagtgggagacccggggaggtggaccccagggagggtctctgagcctccgccccctcctctgggagacagagctccatccctgtcctgcagtgcccaggggagagcagcagtggcacatctggctccccaggcctgtcccccaaggacccaccgcttccctgccatggtcccagggatggagtgcgtttgctgaggacaaggctgctgctgctgctgcgacaggctgctgatggccaggctgccttcctgagggggccttgcccgcacagcaaagagccccctggagcgaggtggctgccagcaggctgtgtgggagccccttcaccactggagggctgagtggtgaaatgagttcttcctgcactgtacatgctcacagacccttctcggttcacattttagcagacaggcttccagcccctccagtgtccagggtccctgtggtgtggggcccccctgttccccaagaaaaggagcaagggtttacccccaggagaccacacccccttctgctgcacattcccgcagggcagctgcgaggggtgaaggagggattgcggcacgaaggttttgtgtgtctcgtgtctagactttaaggcactggggtctctggcaccgctgccttcctccagcccgagtcactccacctgagtccatctgccccacccctgccccacttcctcacaggagtcccctcggcttattccccatcgcatgaaggtggagagtgggtgcaaggcagaaccctggaccccacagttgctgtgaggacgcaggatgcagagtgtgtgttgaggaacggggtgctgggggcccggggagaagggaggtgcaccctcttccctctgagcagcttccgcgggcgggggcagctctgggctggcccgtttcttccagaccccactcattttcaccccccacattatcatgaagcagattccagacacatttcattcatagaactttcagtccaaatctctgaaagatgaggacttttgaaagattgtaaccacaacgccaccatacccccaatactaactctggttccggaaatacagtcagtgttgaatcagtgccccttggctcctccagcaggcgctgccagcacaccggcccaaggcacagcctccagtgcccagctttgcttcagatccagtgccactgccccaccagctgtggggcccaggccaccccttcctggactataaaatggagccctctttggccagccgcccaccctccctcttggtgacacagtgggctgagcgaggggatactgggttttttcttttgcagcaaaatctggcccccctttacagctgatacaaggctgtctgtagtttgaacctttgtgtatctctgcagaataccgggtttgatttgggatgtcatctcagaccctggggtaggggtgtgtgtaggagagacacctctaccccccgggaaaaggcttcccttgctggtttggctttctgaaatccaaaaagttgacagtcactacaggagtagaggcaggtgacacggagtggtcaggctctggcctgggggggacagggatgtaacaggggctggtccctggtgtccagacgtgatccttctgtttactttgtttctgggagctgggagaagcgaaggccatgtttgttttgggcagacatgttctgaatgtccaacactgccagccacactcccaatgttacctctgttcgtccacgtggcaccctggagtgatgcaaggtcctcctccctttgctgcggccccaggggacttgggatctaggggcacctccttttctccccagccaagggggcccatggtcacacccagttctagccactggctaggacgtcccggcccccagagtgtccttgcatgagtgaagctgtggcctgcgggaggcatgactctcatgcctgcgcatgggctgtggtgggaagcactcggtagacgacggccttgctaagctctcagcacaaaccatctcttcacagcgaggtcagctgggggtggagagccgggctgtgaatcctggtgtgccgacaccgcgggcgctccatgcctccctctcgcagggcttctgtgtcgggtgtgcagaccccaggggggccccttaccgcctttctgcatgggcctctgtgtctggtgtgtggaccccgtgggggccctgcaatcagccctttcagagtctccactggaccttgggttctggaggggccttgtggctggcggctggccctgccctgggctgcctttgtgtccttgctggccgttgagggtgggggaagcaggagcgcctcgttctttaacttcccagggtcttcttgctgtgtggccgcctgcaggttgaggagcctgggacaggaagcccagggtcttgatcctgggctgtgcctccactgccgactgctgagtgctttgtgtcccaaagcctttgcgctcaggtggcattccggaggtgaaggaggaaggggcctcagcttagtcgtccgtacatgtgcgcaattattctgaccttgcaggtttgttgtggggattgtggggtctcggcatcggtgagctgaagggctcgtggccctggccgaccacctgtgctgtttgtggtgtttctccactgtctgctcccacctcacctcacctcacctcacctggcagaggagccaccgacgtctgggccagagggctgaggtggggtgaacatggtgtgaaagcaccacactctgcaacagggtggctgtcctgcttgtgcaccctctggggcactcgcaggctggggtagggtgaccccaccaccgtccttctcttgttggaacctccacgttgatttggaccgtagtccatcactgattttcagctggcctggccagtgtctgtttcattgtaatttctttgtggaagcctcagttgtctttcccatctcgggatgtggccccgagctccctgcacagacgtggaaggtgcatgggctctggtcgggaagctgtttgcctcatctcatttccgtcgccctaggggaggtctttcgagttggtctgcaggttgccctggttctttccagtgtctgtgtggggctctcttgcacagacgccttctggtttcttcagcttctctgtctggacagttgagacactgagggtggcagagccaggccctggctgtggctctagcctgtccacccactgtgcttggagggaaggtgtctgcagacgggaccagccctcggccccagaggggatgacatggtgtgaatgtgctgtggacggggacctgaggcactgagcccgtctcagccctccctccccactgggactctgggaactgcacattctcccacagggaggggtcaccccgggctctcacctgactgtcgcctcctggtctcctcctgcccggcgtggtccttgccaggtggtgggtcccagtacctggtagcggagggggcttgagggggatgccacccctttgccctctggctgccctccctccctgcccctcccactggctggtgccaggctgcctgggggctccgcttctatgccaagggcttctgggggaggcagggccacttatcatggcatcgtgttgtcctcgagtttttgcaaaatctgagtgtgtggggtgtaggtgtctcagagggcagggtttgtgttccaggagaggagaggtgagatcaccatgcctcaccaccgagggtggggcagtcgcctgcccgtgtgtgccaggggctttttacactgcacccctcagccttccaggtcttgttggggttggtgtgtttctgccaggtagcggagctggaggcaaactgcaccctcagggcctgtagtgaccactggcattcagtgagcacatgctggcaccaggtgcagccccagagctttaaccacattggccgggatttccctggcagcagcaagagggcttctgggctgggccttggacggctctgccgtggctcgtgggctggtgccaagcagagcctggggcgcccctccttctgccttgctcaagctcacagtccatggccgggcggggctgccctccccacccaggacgaggcatgcactccggtgtccatggctggagctgggctccttctcagtctccggtttgaaacagtggtcaggtggttggaagtgggtggcttagagggcctgatctggccaggcgtgggatcctgacggcagcataagcaggcccccatgttgagctgtgaccgtccatcctcatgcttggaggaagctggcctgcagcctgggagccttcctttgtgccctgaccacccccacatccccaaaggtcagtttcagccccatttcctggctctgggcctgtgcagcagcagtggatactgggaatgtccccacctgaccgacacctgggagctgacatctgggccctgggaggcagcagcagcacagcctgggccttctgtcagggtgctgcccggcagtctcagcggagctgcgtgtggtgcttggtgcccataactggcgtgagctctctctgtgcctgactcctccaccctcaggagcctcgtggggaagtggaaggaccaggccgtgtggctggccccagtgtctgtgctgcctgggggcccagcaggaagggtgttctgggagctacctggaggccttggaagggcaggagcctgctgctgtccaggccttgagggagggccgcaagtcacaggagacaggacacaggtctcaggactcggtcaccccaggccccaccaaccagggtggggcaggactcgctttcactctgagtcacgtggagcccctgggaggttttgagcagaccggtgacttgatccgacttggttttaacaggatcaccctgcggtgcgggctaggcggtccttgcggggcagagcagggagccctgctgggagggcttcatggaaatccttgcaagtggtggtggcgaggggcagtgctgccacgctttggcctggggctgccctccgcaccagggttgcagcctggggctgtgagcaccgggtcggtgaggtggagaggcacccgctcacctcaggagggcatagaagagggtgggtgtgaggggcttccctggatgaggccctggcacaggtgggcgccccagagacggggcacgttctctcgtgctggcatgcttggtgggtgagctgtgttgcgtgtagtttgaagccctttcctctctggggtggggtgggaggaagtgaggatacacgcagggtgctgacgacattgagcatccagcttggggagggggtcctggtttgcagcatttgcccatggctgtggtgtaactgcccaccgaggcagatttcaggggaccaaccagatgtcacccagctcacaaacttcccctagtcttgactgtctgccccgagcgtctacaagtggccggttctggggccggagccggctcctcccatggcagagctgctgcctgtgctccgaggggagcctccagccgtgacctgtctaactgtcagttacacgactgcaggaaaggcccaagtggcagcaaggtacgaggctgaagttgaagtcccaggcgctgggttagagctcctcgggtctgccccacacctttacaggtagacacggggccacgccgcagggccctggccatggtcggaggcctgcatgcgttctccactgtgcagcgttcctatgggcgttctcaactgtccgtgccctcctgggacacgcagggtggcggtggcctcctcctgccagccctgcctgtggctagccagtcggggccagggaagccccagcatctcgcgtgtgcagagctccctgtggtcagctggggtgtggaggtcggcagggtctgagccgccgctcccgcctctctgattggccgagagccaggccgggtcacaaccacgccgccatcacaaacctgggcccgttctcctggttacggtagaacctcactgcttggcctcgctcaagggcaccacctccccgcaccgtgtttgggtctgcaaacgtccgtgttgtgccggccccacttcccctggctgtgttgggcccgcaccgtggctgtccacgcatgggtcactcttcagtacattgttgtggccaagctgtcagagcccagtagcaacgagtcgaccccacgagtgggtggttggtgggcagaaggctgccagtggctgagtcccttggcacacctgcctcccagtgtgttccccaagcccccacctgggagcaagtggcatgtgcctgagctccctccaccgcccaggccttccctcccgtgcctgagagcagtggttggagagtcgttctgagctggtcgcgcttcgcctgagcagctttcccgacagcctctcacctgggtggctgggcaatgggggtgagtgagtggagcaggccctgctgaggcccgacaggtgccctcaggagcccgccgaggctgggagaggtgggggtccccggggtgactggccttcctctctgttgtgcttcctcctctgcagctgtcgcctggttgggcccggaaatgggacgtcgcgctttctcagggagcttagaagcagccagggcctctccaagccgctgctgtgacagaaagtgagtgagctgccggaggatgtccaccgccacgacagtcgcccccgcggggatcccggcgaccccgggccctgtgaacccaccccccccggaggtctccaaccccagcaagcccggccgcaagaccaaccagctgcagtacatgcagaatgtggtggtgaagacgctctggaaacaccagttcgcctggcccttctaccagcccgtggacgcaatcaaattgaacctgccggtgcgtagctgctgcctccccaagagccacgttctgctgctgccgtcctctgtccccctcctgctgcccccatcctggaaagactgcctctggccttgggaatttgctgctaagctggggacagcctgtgcctcaggaagtccacagcacagaggcgcacaggggccacatgggcgtgggagagtggagggcggctgccccaggtgcaggaaatagggagaagccacgcgtgtccgggaggaaagcgggagggtggtgatggggcttaggagtcgaggctcactggggccttcttctgcctcactggctcctgcaggatggcccatctgccagcttggtgagcccacttggagttagaggccgagtgtatgttgaggcctgctttccaggtgatggtgccctcatctgcatgctcatttttgacctgggcccaaatagacaaaccctgagcattgcagaggaatccctgggctggcacttggtggcctgggctctgggctctgctgggccctggtcacctgcaggtttggtccctggaaggtttggccccatctccagtatgtagacctgtcctggggtctgccctaactccgtgggctcctctctgcacatgcttggggtctggagagaggttgggcaggagtttggagctggccaagtactcacgtcaccatagcccactgccttcagagaccagaaagtgcctctgggccagccccagtcctcagtccacttgggaaggtcgggctgtgtccacttgggaattgtgaaaataattatgtagaatcttctggtaatgcctctgaaaatctctttcctaggattatcataaaataattaaaaacccaatggatatggggactattaagaagagactagaaaataattattattggagtgcaagcgaatgtatgcaggacttcaacaccatgtttacaaattgttacatttataacaaggtaagaagatgcgggcctggcacgccgcttgcagtaaggattggggcgctgtgcaacgcagtgggcctgggcgctttgcagcagctcttgggcaggcccaaagcgcttcacctggctgggtgccgtggctcacacctgtaatcccagcactttgggaggccgaggtcggcggatcacttgagctcaggagttcaagaccagcctgtgcaacatggtgaaaccccgtctctactaaaaatacaaaaaaattagccaggtgtggtggcaggcacctgtaatcccagctactcggaaggctaaggcaggagaatcacttaaacccgggaggtggaggttgcagtgagccgagatcatgccactgcactccagcctgggtgacagagcaagactccatctcaaaaaaaaaaaaaaaaaaaacaacatacacacacacacacacacacacacacacacatatattcattttgttctctcctgcgctgccaaatctgttaacaaattttaaatatttttttgagctacaactaataatgtcctttgcaagcacacagctcctttcctgacacgtgacctggactctctgtgtcttcagcccacagatgacatagtgctaatggcccaagctttagagaaaatttttctacaaaaagtggcccagatgccccaagaggaagttgaattattaccccctgctccaaagggcaaaggtcggaagccggctgcgggagcccagagcgcaggtaaagggagctggggcaggcgaggggctgggcctctctgcagaggcccacgggtggatgggctgggacgcgatcctttagccatctgagctgtttcccatctgtcgtgacgagctcgtgggtgccgggtcttggatgagtgtggcctgtgggtgatgttggaggggcagctggcccggggatacggaagacattaacgccatagctggctgcctttgagcccacgctggggaggagctcatggtctaggaggatcacctgtccctgctctccacctcccaaatcctgctcccccttccagctccagccctgaggtcacttcttccatgacgcgtggggcctgttcccctcctggggctttgtctctttagcactcatttgattctctgtgacctgagagtcactatcacctgcctggttccctggtcaagtaagaccgcgtcttgctgtcagggagcatggtggtgattagtgtcgtgagccccaggatcccacctggcctgggaacccggcatgcaggcgttgtctgggtggagaggctgactgagcgggatggccagggccacgggccgtcccgtgttgcagatgggagaagctgggggcttaagtacggccacatcgttggtcactcagcttgttacttagggaaccgagttcagtaccagctttccatgactccagggtggcccttgactgccaggccatgggactgccttggcttcctcgttccgcctcctatggtctgtggtggggggcctccacttcatgcagggagccctcagccaagatgagccagaccaaccctgcccccaagatgcaggatggggggcatctcagcatggagggttcttctggccggcggtcttggcagcacagagctggtacccgtgttctggctggaggggtggcactggaagcttctggaaatactagtggagcctggtgtgttgaacatcccttccttgtcttgaaggtacacagcaagtggcggccgtgtcctctgtctccccagcgaccccctttcagagcgtgccccccaccgtctcccagacgcccgtcatcgctgccacccctgtaccaaccatcactgcaaacgtcacgtcggtcccagtccccccagctgccgccccacctcctcctgccacacccatcgtccccgtggtccctcctacgccgcctgtcgtcaaggtgagcaccctgagtccggatgggtggggcacctgagcccggccagggttcctgaggtcagggcaggagcagcaggcggggggcccccacctttccctgagtgctggctcttgggagtgtttctctctgcgccctgggagctcaggccgttgttactgacacagatgaggagacctaggcctggggagctgaaggtcacacagctggtaagggagggcctggctgaacttgaaccccagcttctctggccagaagccctggccaaaggcttggtcaaggtggggaagttgtgggagagaagccagggtgggaggggtcccggtcctcccctgctcacactcaggagagtggtgccagctgtacctacctgggtgcgttgtgaggtgccagcacccaagctggccccgcctgtgggctccacatgggagcatggggacctgcctgtcctgctccccacttggctgggagcttttctcagtgggccctgttggtcttggcagggagtgggtgctccctgcaagatttggggctggcgaggcctggtgagtctcctgctttgggcagggcccgtgccaggcacttatgtgtattatcttcttcgatttgatcctcacagcaaccctctggggcagacagtatttcccccatcttacagatgaggaagcgggcgctcagaggggttaaatggctcgcccaaggtaaaatgccacctccgttgcttcccctccccgtggccttcactgcctgcacttatgggtggcccctggtcaagccgcctcccccagtgggggctgtttctggagcatgtcccatttgccacggccagacgagtctgtccccgctcctatccgccctgtgcggcacgcgcctggcgcttggcagcacgtgggtgcctgccaagtgtttgtggatagccggctccggcccctgccagtctgagggcggcggcttggctgggcagtgactgtgggtggctctctagacggcaggtgccgtgggctgggagccgtggctcccgctggctcctctcccgctgggctaagattagaagctggctgagctggtctcagggtgcacactgagccctggccctggaacgctgaggtgatgcccatgggtgctgggtgctgaggcccttgcaggctgcccagagagacctgcacacccccaggaggcctggacgttaaacatgcgcgtctgcctggtgcctggctccgtccccaggacacacccacagaaggttctgtgggtcatctccctcctctccttgcttgaaatggccttcggtggctcccactgctgctgggatggagtccagacttgcccactcaatccctgaggtcccttgttcccagagctgctgtggctgcttcatgcctcctggttgggctgccccttgccctgtgtctggaatgctctcctgcctccctcttgtcccgcaaaacttgtgtttgtccgcggagcccccgctctcaggcccttgtctggaactttcctggaagcagggagttcctcccaggtctctgcagcaccgaggtccccgggtcctggtctgggtgcttgttaggtgtctggcgaattgcatgcagcacctcacatggcttggggtgtgaggtgcgagcccacccgggacccctgagccctcggggctaagggagagaggtatctcccctcgcccaggtgagggcgggtttcagagttgatcctgagggagagtcccagcctcaccactgccagctgtgtgaccttgggccagtgacatggcccctgagccttggtgtcctctcctgtggggccgtgcatgtggccgcttagcccagcgccaggcaggcagacagtgccccagaaacgcggctgcagcgacatgcgtcttcggggcccctggtttccggggttcactggttatttcactgtcgcagaaaaagggcgtgaagcggaaagcagacacaaccactcccacgacgtcggccatcactgccagccggagtgagtcgcccccgccgttgtcagaccccaagcaggccaaagtggtggcccggcgggagagtggtggccgccccatcaagcctcccaagaaggacctggaggacggcgaggtgccccagcacgcaggcaagaagggcaagctgtcggagcacctgcgctactgcgacagcatcctcagggagatgctatccaagaagcacgcggcctacgcctggcccttctacaagccagtggatgccgaggccctggagctgcacgactaccacgacatcatcaagcacccgatggacctcagcaccgtgaaagtacgtggccgcgcggcaggccctgctctgcccatgtcctgcggctctgccgtgggtgctgatgtcttgtgccggctgagtcggggctgtcggggagcagggtctcgcttgccggagaagcgcaccctccaggctggcccccgcagcgccggctgtggctggcaaggctcagcgaggaaggcgtgctctgcctgtgggtcccggagtctgtggctctgttgttgtttattcccatcgaacccgtttagtgatttcattgatttcattcctacctcccattctgtatcatcaggtcagggggtccctagagctgggccactctcacagttggcaaagttttaaagctgcactttgcttccctcaagccccggatacaggcgcctcacagcagacaggagtgaggcggccagtggggatggcctggcttctgtcccctaagtgcctccaagccccaccccctcacaagacggaagcgggacctgggtgggtggcagagctgagaccgagagcctggcctcccccatgccagtcttctcaaggcggcagcctctgcctgggctcttgtgtgcctcacagcaagtcagagtgagtctggtccctatggggggtggtggtgggtgcggcatttgagctgcaccgccccaagccagggtgagctccaccgggtcttccctgagcacctttccagactcctggctggcacctgccctccctctgggagagctccaagccagctcccagggacgtgcaggcagttggcagaggtgtgacctgcctcctccgccaactgccgtgcggccctgggaagagctgctggcagccctgttgggcagttgttttcatcctgggaagccagtcgcagtcattctgcctacctgaggcaggatctgctgatgaaacccttttcttccttgattgactggatctcgggcaggacagacctggctggcccaggccccagagcccggtgcacagtcaggtgaaagtgacgagcggggccgcctggctccactgccgtgggtggggaagctgagggccagagccacgcagcccagaagctgccaggagcctcggctgcagcctccagggctggggtttgtgtgtctctaccatagcacagttaacaggaatttctggaacatcatggggggttccagtgtttgggctggactcaagctcagcttaattccattttggtcaaagggtctgatttgcccttgaaaccataataaagaagctctagaaaaacaattcactttaaagtcatgatctgctttgttcggagcttcccacctctatctgtcctggcatggcatggggagaagccaggtgcagtggcagcacttgctgcccgcgactgtggcccggacgctgcggaaaaggggcagtgaatcagggagagaggcctcaggacctctagattatacagatggagcttttggggatggtttatcccggcacatgctaaaacggaaaactagcttttcccccaacatcagaggcttccaggtcccactgtgcccccgggttctttctgccagcccttccttctggatgggtctcatgtctgagtgcatagggtacgggccctgagttgggggcgccctctgcgggttaggacccggcccctccatctcactggcacctggacaaatgcagcctggaccccacagagcggtcggggtagatttgccttgcccttgcgtgtgtcgtccctcgaggtccccgacaaggtgcctctccttgaagccatcccaggatgggaaactcactccctcgggcacagcgtgacctctctttgccccaactagtgtgttcccagtggccaccttgaagcgtccctcgacgatcctgcctctggccactccctggcagagccacctgcacctcccagctctggggactgactgtgtgcccctccttacccctgccacctggcactgtctacccaggccttggcctcagttctctgcttgccagagccaggtgggacctgcggtgggttttgctgtagggtctctgtgtggccgagtaaacgtgggtgggtgtcagccgacatgcccctgttgcctccacccctgtggggttcaggagctgccgctggacacagcgtggagtcccttaggtccagctaggcccctgggataccagggtgcttctgtaagacgcaagctggctaacagctactggcttcctcgagggaaaaaattacatttccttgtgtagactgagcaggccccctgttgttggtggagtctgactttgctgcagcctcacgccccctggggctgctgatggcatggcggcgtgtgaagatttacccgctttgtgtgaagggaagctctggacaaggaaggggccaagggacgcctacgggaacctgggatttcttgttgagtgcatttttcttccaatcaggagatctgtctctggagtcccagaccctccctgccaagccatcaagtcaccctctcatgtcctcactttgggtttcctcgtacgaggtcccagagagctggggtgtcctgccggccaggccagtaggcactgccctggagctggcagtggctcctgaggctccagagttcatctcgtggggtgtggcagagagtcctgatgccacgggccacgctcactggcccctgtcactgtgtgttgcagaggaagatggatggccgagagtacccagacgcacagggctttgctgctgatgtccggctgatgttctcgaattgctacaaatacaatcccccagaccacgaggttgtggccatggcccggaagctccaggtaacccgaggctgggcacgggtggggctgctcagctcagtgctgtgggcatcctggcctcagtgtggggtaagcgcccaggtgaatgtccagccgaggaaggccttagagagcctcattccctcaacacctttttcccgagtgccaaccaggtccctgtcaggctctgagctgggttccaggagctgccactggggcagggcagccagcgagcaggtgggaccactggggctctgtgggggtgtcgcagtagtgagtctttccctccagggactggtgcgtgtaccaggtgggacggcagatgctctttctcttgcagcttccctgactgtagtttccagcaagtcttctgtggcaaggagaggcttggacactagcctgtcagtgcagccggtggatgaattaggtgacagtggcttgtgtagcattttgcttttctgacaacagaagtaaaaggcggattggagaaaatgcaggaagcagtgagatgtcttcagggaaaacaggagtgtcttggtctagctctcagcgcagggactttgtgaacatgcacaaacctcacagagatatttgtgtgtgtgtgtggacgtgtgtgcgtgtgtgtgctcctgcctgcgtgtgcatttttctgccaaagtccaggtcccgcacacatattttggtgtgggtggatgtgccagaatctattcttaccttctctaattgtgatcgcaggtggtttgcttttataaataacagcaccactgttataaatgttaatcaaaggacttgatttttggaggaaaggggagaattatgggtatgtgttctcttccagcatgcttttccttttcacgggacccagaatgtcatgttaagatgttctcagtccttgcatagactgttttgaaatccccgagcagcccatggtattattgtggatgacacaggacccataaaaggggcagagagagaaactcgttccccctgtgggtcctgctgcctttcccaccctctcgcgcacagggcctacccaaggtcctctcccaggcactgctgccattgccaccctctctgtgcactgggtcctgtgggtgatgatggcagggtggtcctggaggtcccattacatccagaggaagccgtcagaaccctggttttatactgagacctcacttactgtgtcttgaacccaaaagaccttgcaaaggccagtcctctggagcctggtaaatactgggttgagtttaacgagggagctgagcatagaggacggaaacccaggcttgcagacggagcagggaagctggcagctctgcccctgctcctgaaacaggtgctgttggatagacatggtgctcacgcctgtaattccagcactttgggaggcggaggtgggaggatcacttgaggccaagagtttgagatgagctgtctctacaacagattttaaaaacgagtcaggtgtggtggtgtgtccctgtagtaccagctattcaggaaagtgagatgggaggatcacctgagcccgggcgttggagactgcagtgagctgtggttgcacagcactccagcctgggcaacagaggagaccctgaggctgatggatttccatgactgagcactatttagcaattgtgcaattttatcagttgagctgtggggttagagcccaacagcaaaacgacctgacctgcatggccttcaaggctgtcggccgagcgggggcctggaccgctgctctgtgggttgggttgcctctggggacatctcctgagaggagagcctgggatatgagagcctggggtgggcttctccagagctgggtccagcctgaacagtgaaggcatgtcacgtgagcagacggtgtggattcaggtttctgaccttggcaaaaagaaatctcccctcatttccacatcactgtgcctccctgtcttcagtgagcctgggctgccccagggagggggatgtttgctgagaggggtgacggagggcctaggtcctggtccaaaggctttccaaagtcaattttgataggaagtctgggtgtggtggcttacccctgtaatctcagcactttgggaggccagggtgggaggatcacttgagctcaggggttcaagaccagcctgggcaacagagcaggaccctgtccctacaaaaaataaagtaggccgggcgtggtggctcacatctataatcccagcactttaggaggccaaggcaggcagatcacgaggtcaggagttcaagaacagcctggccaacatggtgaaacttcggctctactaaaaatacaaaaagttagccgggagtagtggcgcatgcctgtgatcccagctactcaggaggctgaggcaggagaatcacttgaaatcaggatgtggaggatgcagtgagctgagatcatgccattgcactccagcctgggcaaaagagcaagactctgtcttgagagaaaaagaaaattagtaaaagtaaaacttaaaaatgtgtgtgtgtgtgtgtgtatatttgtgtatatatatgtgtgtgtgtatatatgtgtatatatgtgtatatatgtgtgtatatatatgtgtatatatgtgtgtatatgtgtgtgtgtgtatatatatgtgtgtgtgtgtgtgtgtgtgtatatatatttgaggcagggtctcactctgtcacccaggctggagtgcaatggcatgatttcggctcactgcagcctcgacctcctgggttcaagcaatccacccatcgcagcctcccgagcagctaggatcacagacatgtgctgccatgactggctaatttttatatttttttgtaaataaagtatggataggactagactttggccttttaagccaacttttggagttcaccgttcatgagatgtgatgctgcagtcagttccggggtgaagagatgggaagaggtcaacactcttggactcctgtggctgtggaggaccctgtccaagctcaagggaagacactgtttcccgtttcacagcagaggcagccccagggagctttgggccaggaggctacaaggatgcatgcatcttctagagagggctcatggagttgctgaagggagctgtgggccagctcctgtgtcccctcttcccaggcctgtccgcaggaattgcctggggagggagggtgggcaagctggaagcaaccacagccccccaggcaggcgggaccctgtctcctcctagccccaccttcgtaacagctgtgggtgctgcctcaggggcacctcagaaaccctgagggcccacaccaaggggcagccccatgggcatccatgtcttcagggcagcctctgttctgccgcaggacgtgtttgagatgaggtttgccaagatgccagatgagcccgtggaggcaccggcgctgcctgcccctgcggcccccatggtgagcaagggcgctgagagcagccgtagcagtgaggagagctcttcggactcaggcagctcggactcggaggaggagcgggccaccaggctggcggagctgcaggagcaggtgggcactggcatgcttgggtggggttcaggggctgaggcgggattgctggcacagcagcccaaggtccgtccctttgcatggttccttcctctgcccctgtccctcagcagccgcggtagtgcttccccgtaaagacactcggagtgccctccccaggtctggggtggtgcgagcctaacccacagcacacgtgggtggctgcggggacacgtggctgggatgtttctggagacctggcgggcctcaggtgggagctcaggggtcatgtgtggttatgtgtgccttgctctgctccagaaaggcctgtgaggcacttgcagaggccacagtagtgcctgggctccaagcagtcacttgcagtggggtggggtgcaggctccagggtcctgagggccctgccgtgcagctgcccagccccagtcccgctgccaggctgtgcttcctcccccttctctgctttcctcgtttgcagtatgggacaaatgtcacccactctgagctgtcttgaggtcagattgagaaagatgtgaattgtttccccagacctctggcagccagccagatgcatgatttctgggaccccagattgggagaaaatagagcagggctgtcgagtcaggaggggaacagcatgaatcagggctgcaaggacagcgatggccctgcagtccccagagttgggctggacatttgattttgaagtggcaaggacacacagcagggaagacggctgtgaggtggcagctcctccacccgccctctgtcttccttgcacagaccacccagaggcagggacaggccgtggactcacatgggcagtgcctctcaaggggcctctcccatggaggtggctgcagtggggagggcgaggcgcttggcacaatgccagctgcagggcggccctggattaatgctggttgctggcagtggattgttttaaccccggagtcctgcgtgttatcaaatggcttcccagaaatcactgatgaaaatctcctttgtgtgggcatttaaacttctagagagtccttccttatctgaacaatggtaataataaaaatgttagctgcccacctaatgtagatgacgggttgatgggtgcagcaaactaccatggcacatgtatacctatgtaacaaacctgcacattctgcacatgtatccccgaacttaaagtataatacattttttttaaaaagttagctgccctcaccgagtccctgttgtgccacccgcgcagtgctgagcctgtggccaggcagctcttccccactgcaggcgaagaagccgaggcggagaggtctcatgactcactgggggtcacgggagtgaggggcagagcagggcccaggtgctcctggttcacctcctcacccagctgaggcagctccgacatcgccccaaaccccctccaatcccagggcgccacgcagccccagtggtgtgggccgtgcccagcacctgctcagccgcccgctcttttccagctgaaggccgtgcacgagcagctggccgccctgtctcaggccccagtaaacaaaccaaagaagaagaaggagaagaaggagaaggagaagaagaagaaggacaaggagaaggagaaggagaagcacaaagtgaaggccgaggaagagaagaaggccaaggtggctccgcctgccaagcaggctcagcagaagaaggctcctgccaagaaggccaacagcacgaccacggccggcaggtgggctccagacctgctcgggctccaagagcccagcgctcagcacgccatgggggctcatgtagcagcagtgctgggattgggggctttgtgccttggccacctggaaaccagggtgatgggggcagggagacagagggcctgatgagacctgtgctgggaagtccgggggcccaggtgatgctgctcagttgtctgcggggctggcctggattctgggcattgaagcgctggcacggcctggtctccacatcatgaagcttttgggatgtttctctggtctgggccaaggatcttgactagggggagttgaacgccccattttggacttgcccataggcagggggcagggatggtggaatcgtgcacagctgcattcagcctccttcgggagcccctgctgtggctgggcaccaccctgaggagcgtctgctagggacatgcaggagccacaaagcagtgtgagctagtagggaaggagctcaggcccgggatgggagctctcctggccaggtggaagggaggcttcccaagggggaggcaacagctgtgtgggagcaagcttggcagcagagggccagggagggagttccaagaacagggaacaacgggtacaaagccacagaggccagtaggacgtgttccttttgggaatgagggcaaagttggcaccactgaaaaagaacaagttgggaaaaaaggtgagttgaggctgctgagatcagccggctttgtttgaggtgttcatgcttccttttcaagcaaatgaaggagagttaggatttaagctcaacatgatcagatcctcgccactatggagaatagcttagtggaaatcaggaatggaagaaaggatacccctttggaggttatggtggttgtgcaggcaaaagaaattggtgtggctctggagatagactactttgggaggcggcatggccaggccctggtgcttggagggaggaggggaggagcatgggggtcctgggtttggggttagacagctgggtcagccattaatgaagacagcgagtggaatggtcgggataggtctttccttcccttattttctccctccctccctctctcctttttggaggcagatgcagaaatccatttttcttatacaggttgagtatcctttatctaaaataaggatgtttccaaaataaaaggtgcttctgattttggattttttcagattttggaatatttgcattatactccccattgagcatctcaaatctgaagcatctcaaaactgaagcatctcaaatctgaaaatctgaaatgctccagtgagcatttcctttgagcgtcacgttaagactcagacagtttcagattttggagcattttggatttttggatttgggatacccagcttgtactatctttgtctgtttttagtgtcagtataatgctggcctcaaaaatgagttgcagcctggtgtggtggctcccacctgtaatcccagcactttgggagggccaggcaggaggatcacttgagctcaggagttagaatcctactgtgttgcccatagtggtctcaatctctttacaaaaaaaagtgttggttgggatataatatttgagtgattagaggcaagtaaaaagtgatttgaggccaggtgcagtggctcacacctgtaatcccagaaatttgggccaacatggtgaaaccctgtctctactaagaacagaaaaaattggccgggcttggtgacgggcgcctgtaatcccagctactcaggaggctgagacaggagaatctcttgaaccccggaggcagaggttgcagtgagccgagatcacaccactgcactccagcctgggcgacagagcaagacttggcctcagagaaaaaaagaaaaaaaagatttgaaaggtgttgcccctcttctgttttctggagtaaatgtatagaattgatattaatacttaaatgtttggtaggattcactagcagaaccatctgggcctggagttttgattgttggaaggtttttaatcatgaattcaattattttaataggtataggcttattagattatcagtttcttcttgagtgagttttagaggtttatgcctaaggcgttaatccattccactcggattgtcaaacttatggacataagtctattggttagtatttctctattagccttttattgtctgtagggcctgtagtgatgtgtctttttcattcctgatattggtaatttgtgtctttttttcttggtgaatctggatagagacataccaattttattgatc

SEQ ID NO: 796 - DNA, 3154 bp, Homo sapiens
cgggcaaacacaagctgctaagcactggccccacagagccatggtccatccgagagaagctatgtttagcatcttctgtcatgagaagtggcgatcaaaattgggtatcagttagcagagcaatcaagccctttgcagaacctggccgccctccagactggttctctcaaaaacattgtgcttcccagtactcggagcttttagagaccactgagacaccaaaacggaaacgaggtgaaaagggagaagtggtggaaactgttgaagatgttattgttcggaaattgactgctgagcgagttgaagaactaaagaaagtgataaaggaaacccaggagagatatagacggctaaagagagatgcagaactaattcaagctggacacatggacagcagactggatgagctttgcaatgacattgcaacgaaaaagaaattggaagaagaggaggctgaagtaaagaggaaggctacagatgctgcataccaggctcgtcaagcagtaaaaacacccccccggaggttacccactgtgatggttcgctctcctatagattctgcctccccaggaggtgattatccacttggggacttgactccaaccactatggaagaggctacctctggggtaacccccgggactttgccgagtaccccagtcacctcgtttcctgggattcctgacacccttcctccaggctctgcacccttagaagcccccatgaccccagtaacagatgattcaccccagaaaaagatgcttggacagaaagcaactccacccccctcccctctgctgtcagagctcttgaagaagggcagcctcctgcctactagccccagactggtcaatgagagtgaaatggctgtggcttctggccacctgaacagtacaggtgtcctcctggaggtaggcggggtccttcccatgatacatggtggggagatacagcaaacacccaatactgttgcagcctcccctgctgcatcaggtgctcccactctttcccggcttttagaagctggtcctacacagttcaccacacctcttgcttccttcactactgttgccagtgagcctccagttaaacttgtgccaccccctgtagagtctgtgtcccacgctaccattgtcatgatgcctgcgctgccagcaccatcctctgctccggctgtctccactactgaaagtgtagctccagtgagtcaacccgacaactgtgttcccatggaggctgtgggggatccacatactgtgactgtttccatggacagcagtgaaatatccatgatcatcaattctatcaaagaagagtgttttcgatcaggggtagcagaggctcctgttggatcaaaggctcccagcatagatgggaaggaagaattagatctggctgagaagatggatattgctgtgtcttacacaggtgaagagctggattttgagactgttggagacatcattgccatcattgaggacaaggtagatgatcatcctgaagtgctggatgtggcagcagtggaagcagcactgtcattttgtgaagaaaatgatgatcctcagtccctgcctggcccctgggagcatcctatccagcaggagcgggacaagccagtacctctccctgcaccagaaatgacggtcaagcaagagagactggactttgaggaaacggaaaacaagggaatacatgaactggtggacatcagggagcccagtgcagagatcaaggtggaacctgcagaaccagagccagtcatttcaggagccgaaatagtagctggagttgttccagccacaagtatggagccaccagaactcaggagtcaggacttagatgaggaactgggaagtactgcagctggagagattgttgaagcagatgttgccattgggaaaggcgatgagactccacttacaaatgtgaagacagaggcatcccctgaaagcatgttgtctccatcacatggctcaaatcccattgaagatcctttagaggcagagactcagcacaagtttgaaatgtcagactcattgaaagaagaatcagggactatttttggaagccagataaaggatgccccaggtgaggatgaggaggaagatggtgtcagtgaagcggccagcctagaggagcctaaggaagaggatcaaggagaaggctacttgtcagaaatggataatgaacctcctgtgagcgagagtgatgatggcttcagcatacacaatgctacactgcagtcacacacactggcagactccatccccagcagccctgcttcttcacagttctctgtctgtagtgaggatcaggaagctattcaggcacagaaaatttggaagaaagccatcatgcttgtatggagagctgcagctaatcataggtatgccaatgtcttcctgcagcctgttacagatgacatagcacctggctaccacagcattgtgcagaggcctatggatttgtcaactattaagaaaaacatagaaaatggactgatccgaagcacagctgaatttcagcgtgacattatgctgatgtttcagaatgctgtaatgtacaatagctcagaccatgatgtctatcacatggcagtggagatgcagcgagatgtcttggaacagatccagcaattcttggccacgcagttgattatgcaaacatccgagtctgggatcagtgctaaaagtcttcgagggagagattctacccgcaaacaggatgcttcagagaaggacagtgtcccaatgggctctcctgccttccttctctctctctttgatggaggaaccaggggacgccgctgtgccattgaagcagatatgaagatgaaaaagtgaagcctcagagttaccctctttgagccgaacctaaaataaaagtaaacaagatagagcttgggcttgcgggcccagttccagaggtggaagttacagaagaggaggtacctgggccacacgacatgagctggaaaatctctcttagagagttggagtagcacaattgcctgttttagggcagaaaccatgggctatgttaatgtcctaatgtgtagctagcagatcgtagctagtttgtattgtcttgtcaattgtacagactttttaaaaaaaacaaccaccagtgaaatgtgtgtgtatacaataaactg

SEQ ID NO: 797 - DNA, 2474 bp, Homo sapiens
cgccctttcaactctgccaagaatggctcccacctggctctcagacattcccctggtccaacccccaggccatcaagatgtctcagagaggcggctagacacccagagacctcaagtgaccatgtgggaacgggatgtttccagtgacaggcaggagccagggcggagaggcaggtcctgggggctggaggggtcacaggccctgagccagcaggctgaggtgatcgttcggcagctgcaagagctgcggtggctggaggaggaggtctggctcctgcgggagacctcgctgcagcagaagatgaggctagaggcccaggccatggagctagaggctctggcacgggcggagaaggccggccgagctgaggctgagggcctgcgtgctgctttggctggggctgaggttgtccggaagaacttggaagaggggaggcagcgggagctggaagaggttcagaggctgcaccaagagcagctgtcctctttgacacaggctcacgaggaggctctttccagtttgaccagcaaggctgagggcttggagaagtctctgagtagtctggaaaccagaagagcaggggaagccaaggagctggccgaggctcagagggaggccgagctgcttcggaagcagctgagcaagacccaggaagacttggaggctcaggtgaccctggttgagaatctaagaaaatatgttggggaacaagtcccttctgaggtccacagccagacatgggaactggagcgacagaagcttctggaaaccatgcagcacttgcaggaggaccgggacagcctgcatgccaccgcggagctgctgcaggtgcgggtgcagagcctcacacacatcctcgccctgcaggaggaggagctgaccaggaaggttcaaccttcagattccctggagcctgagtttaccaggaagtgccagtccctgctgaaccgctggcgggagaaggtgtttgccctcatggtgcagctaaaggcccaggagctggaacacagtgactctgttaagcagctgaagggacaggtggcctcactccaggaaaaagtgacatcccagagccaggagcaggccatcctgcagcgatccctgcaggacaaagccgcagaggtggaggtggagcgtatgggtgccaagggcctgcagttggagctgagccgtgctcaggaggccaggcgttggtggcagcagcagacagcctcagccgaggagcagttgaggcttgtggtcaatgctgtcagcagctctcagatctggctcgagaccaccatggctaaggtggaaggggctgccgcccagcttcccagcctcaacaaccgactcagctatgctgtccgcaaggtccacaccattcggggcctgattgctcgaaagcttgcccttgctcagctgcgccaggagagctgtcccctaccaccaccggtcacagatgtgagccttgagttgcagcagctgcgggaagaacggaaccgcctggatgcagaactgcagctgagtgcccgcctcatccagcaggaggtgggccgggctcgggagcaaggggaggcagagcggcagcagctgagcaaggtggcccagcagctggagcaggagctgcagcagacccaggagtccctggctagcttggggctgcagctggaggtagcacgccagtgccagcaggagagcacagaggaggctgccagtctgcggcaggagctgacccagcagcaggaactctacgggcaagccctgcaagaaaaggtggctgaagtggaaactcggctgcgggagcaactctcagacacagagaggaggctgaacgaggctcggagggagcatgccaaggccgtggtctccttgcgccagattcagcgcagagccgcccaggaaaaggagcggagccaggaactcaggcgtctgcaggaggaggcccggaaggaggaggggcagcgactggcccggcgcttgcaggagctagagagggataagaacctcatgctggccaccttgcagcaggaaggtctcctctcccgttacaagcagcagcgactgttgacagttcttccttccctactggataagaagaaatctgtggtgtccagccccaggcctccagagtgttcagcatctgcacctgtagcagcagcagtgcccaccagggagtccataaaagggtccctctctgtcctgctcgatgacctgcaggacctgagtgaagccatttccaaagaggaagctgtttgtcaaggagacaaccttgacagatgctccagctgcaatccccagatgagcagctaagcagctgacagttggagggaaagccagcctgggggctgggaggatcctggagaagtgggtggggacagaccagcccttccccatcctggggttgccctgggggataccagctgagtctgaattctgctctaaataaagacgactacagaaggaaaaaaaaaaaaaaaaaaaaaaaaaaaaa

SEQ ID NO: 798 - DNA, 2926 bp, Homo sapiens
gtccaagctgtttaagtgtaacccttacttgtagggtgccaagtaaggagaattgggttgcttacgcttgacacccgacctcccagatggcttaaacgtaagggtttatggaggcagggaggcataagttataggcaaggtcataaatcaacacagggaggctatacattggtttgacttaaaaagacaggacatctccaagcagaggcccacaggtcataggtggactccaggattttctgatttgtgattgattaaggagtcaaagctttgtctaagaatgtgtgatcggcagaaaagaaggtgagctctggttcataggcatgaccttctccaggcccctcaggaagaaatttagaacaaagaataccaatcagttttgagtcctcagcctctccttacctgagatctgtgtgccagtggctccatttggtggggtctaggtttctggaaaacaactcagggacatattttaagatgttgtctttggtttttacagggaaccaaacatcttgtgactttagtttgtttggctattaagtttttttttgttgttgtggtttattaagtttttatttacttttttaggactagttaagtgactggaagttttttgaatgcaccgaagattaaaaaaattatgtctttgggggcccacaggctcctaagaggggttcctgctctgttttaaggatccttaacttaatcatatctatgatgtttcagttcagtttcagttcagggtcttccctgaagttattagatgtcaactgggactgtaatcgtccgaaggtttgactggggctggagggtccacttcaggatggtgaactcctatgactggcaggtggtatctggctatatgcaggagggctcagttcccttccacatggcccgctccatatttttcccatacggatccttgagtgtccatatggcattgtggatggcttcccccagagtatgcagcaatcaaggcagtagtagattttatgacctagccttgggaagcacacactgtcaccttcacagtattttattggtcacatgggtcagccccattcaatgggggagggtactctataagggcacaaatgccaggaggcctcagaaacataaatatttttgctatgggtatagattcatgggttttaggctggaagaaaccacaaaaataccctggttgacagtaagaatcagtcccattgatgataaaagatggaatttaaaagcttaatagggacaattttcttctgcaaagaggtagatggggtggcatgaatttcttgtgttagagacagttttaacagatgaaccctcaggtgccaagtcagttaaccagagctgggttgacaatcagggatttaggagggaaaaacccaaggcaaggaaagtccttgtgaatgtgaccaggtggaggaacaggtagatgacgatttgccaactccatgttcaggggctgagctgaggccagagtcggcagctggtatttcttctccaatgggcaacttagggtggctttttgggctcagtggcactccagaacaagtctagcatattggctggtggtagcaggaccttactgacattccatatggaatggagctggaagcagtcctgtgaggtctgggtgacactcgcacatcctgtaaggatggagaagcaatggactagggagctgagacccccaagaccatcattcttgcccaggcttcagagacaactgaacttcttcttggtcattcacaccagactggagatggctgagtggttgttccgtaagagcaaggagagagaagccggctccgggaattaagggcgtgtgcatcgggtagaatgcaagccaagcattcagaaatggtccagtccagtgaaaatggaggcttgtattgagtctggggcccaaggctgagagaaggctggctccgtcgaaccagaaacagcactgagaacctggctggtggcaccggcttcagctgcacagagagggggtcagcaggccacacagggtcatcctgaccagcggtcttttttgtggggtgtcgtgaagaaaagcaatgctcaagggtagataacgaattttctaagactgagcagccagcttagtggcagagtgaaaatgagaatagaagtggaagtacactggaatgaagatggctgcttagttttatctgcctcacccactagctagaacgtggctttagccataataccaatatgtatttttggaacattcctttgctcttttcctttgactttggatagcagatgcggtctattgcattgctgtgattttcagatgaaatcaagcacagtggtttacttttaaccaaaccccagtcatacttcctctctctgactcagcttccttgtcgtacgtaagattgatgacacacgccaccagctcacatttacaaaggcgttctaggtcttttgatgaacacctatatggcatctatattaatataattttctctgtgagaggagagatttaaatgagagttgtcttagtagctgaggaaacagatacaatgattaggggaatagctaatttcttgcctgatgtgatgtatggaaactgagaaaagcctggaaaaggaggttggaaaactgaaagtgggtgggcaccacttttcacacccaaccctctttccatgcccaaaacaccgtgggggcatcccctcctcacagggcctgtgtgctgggctgcactgacatgcattccggctcagagttggcttcacccttaacagcgggtactgggactctgtggacacatggacaactttacttaactctaaatcggggtgtccagtgttttggcttccctggaccacattggaagaagaaaaattgtcttggaccacacataaaatacattaacactaatgatagctgatgagctaaaaaaaaaaaaaaaaaaaaa

SEQ ID NO: 799 - DNA, 150147 bp, Homo sapiens
aagcttcatccatgttctagtatatgacaagatttccttctttttaaaggcagaataatattccattgtacatatatgccacattttctttatccattcatctgtcaatggacatttaggtttcttatacctcttggctattatgaatagtgccgcagtggccatggatgtaaaaattctctttgagatcctttttttcaattcttttgtatatacacacagagacaggattgctggatcatatggtaattttattttcaaatttttggggacctctctactgttttccacagcagagtagttcatctctttttatttttgagtagtattccatcgtacagatgtaccacattttatttatccattcaccagttaaagaacatttggggccaggagaggtggctcacgcctgtaatcccagcactttgggaggccgaggagggcagatcacttgatgttaggagttcgagaccagcctagccaacatggtaaaaccccatctccactaaaaatacaaaaaattagccgggagtggtggcacatgcctgtaatcccaactattcaggaggctgcggcgggacagttgcttgaaccctggatgcagaggttgcagtgagctgagatcatgccactgtactccagcctggatgacagagtgagacccgtctcaaaaataataataataaagaacatttgagttctttccattttcaggcaattacttatacataattgtaatggctatgacatttgcttgaaggtttttctgtgaacgtaatttttatttctcttgggtgaatatctaggtgtaagagtaactaactgggttgtaagataagtgtacattcaactttatgagaaactgccaactatttttcaaagtggctgtatcattttatgtccccaccagcgatccataagagttccagttgttcagcatcctctcccgcacttgacattgtcagctttctgattgttagtcattctaattggttgtagtgctgtctcattttctttttaatctttatttcccaatggctagtgatgtcgagcctcttttcatgagcttatttgccatccttatatcacctttagtaaagtgtctactcaaatcttttgcctatttttaagtatttattaataatattaatttagttagggtttattttattggcttgtttttgtttcttattgaattgttcgagttctctgtatattgtggatacaagcatatcttatgcgatacacttttgccaatgcatttttttttcttttgggacgaagtctcactctgtcacccagcctgaagtgcagtggtgcaatcttggctcactgctacctctgcttcttgggttcaagtgattcttttacctcagcctcgccagtagctgggattgcaggcatgagccaccatgcccagctaatttttgtatttttagtagagacagggtttcaccatgttggccaggctcctgacttcaagtgatccgcctgccttggcctcccaaagtgctgggatcacaggcatgagccaccggtgacacttggcccacaaatgcatttttctagtctgtggattaccttttcatttatttaatggtatccttcaaaaagcaaaagtttttgattttgttgaaaattttatcagtttaccaattgataaaactttatcaatttattttttttcttttatcaatcctggtgttgatgttgtatctccatgcatctactcttgaatgctcagatttgcctatcatccttccttgctcacttacctcagtagcaaccctgtctatcacttttcatagcttacaaccatctttcacatttaatcatttctttgatcatcaccttcagtaaagttaggccagatattctccagatgagcttattgctggtgctcaaatgctcaaaatggcttgaccaatgccatacagtaagcacggatgatagcgctctcatggcttgaaactaaaactgacttgtttcctaatgcacatgaattgtacacctccctcccctcacccccgaccccccctcaaccgacagacacacacacacacacacacacacacacacacacacacacacacaccagcttctctcttcttggtcatcatcctaatcagcatcacctcctctttcactgtccctcccctcaccctgctgtcagccccacaatgctttcaggggagtgtggagtgcagacaatacaatgctcttcctggaaaccttcttcctcttacctccctgtcccgtgagtcctccagctattttctgatacccagttattgcccacgtcctttaattccttggaaaattacccaactccatcccccttttatgtgactttgtctccagacaaatctacatgtagcgtagactgtcagatagggagacctgatcacagaactttggcttcctcatcctaaaataaaaccaattacatcacaggattgtaaccaagtacaatccattataaggattaaataagatgttttgtaaaggatataatgcctatgcatgaatcattatatgacaaatacactctttcactaccttaattccagagaaaagcctcataggcttccgtattgtaggtatgcaggagtgtccctcacctattcttattcagaaacctcctaactggcctccatattgtgaatcagcttctcctttctgttctaagcttggcgcttacagatgccatctccctgagcacaactcagaactcagccatgtcccattgatttcagtctaacgcactttctttttttttttttttgagacggagtctcactctatcgcccaagctggagtgcaggggcgcgatctcagctcactgcaacttccacctcccaggttcaagcgattgtcctgcttcagcctcccaagtagctgggattacaggtgcacaccaccatgcctggctaatttttgtatttttagtagagacagggtttcaccatgttggccaggctggtcccgaactcttgacctcaagtgatctgcccacccccgcctcccaaagtgctgggattacagatgtgaaccaccttgtcccgtcctgtctaacccactttcaacatttaaaaacctccacagcacagtcccatttcaatcttatgggtccctaatcccttcccctactccaacatgtcaagcaacgtgaactattatactttatggtttaataagaacacatatgcagccaggcgccgtggctcatgcctgtaatcccagcactttgggaggccaaggagggtggatcacctgaggtcaggagttagagaccagcctggccaacatggagaaaccccgtctctactaaaaatacaaaaattagcctggcatggtggcaggcgcctataatcccagctactcaggaggctgaggcaggagaatcgcttgaacccgggaggaagaggttgcagtacaccaagattgcaccacttcactccagcctgggcaaaagagcgaaactccatctcaaaaaataaaaaaggaaagaaagaacacatgtgtactgttactcctggccccaccccctccacccaaaactctccctctgccctcatattacctgcacctataaaacaaagtctccctgttcctcaagacccaccttactgtcactctcttcctgcagcctttctcagtaccctactattatctctttgacttttggcaacctttgtacctctttgatattactgctctatattacagctattatcttattgtcctgtgtggcagttatctgctcaattctcttaaccctgttcattcagccctgggacctatctagtaacttgaacagtaacctactcgtatgtgatcaagggtcaattgatacttgttaaattgattttaaatgttaatgcatattctgggacttgaaagttaacacgatgatgttgtcagaagtgattgttgattgttaagattttcagactttgaaaacttctactttgcaaagctgaattagacagcaaagttctgtagctccctcctggcaaggggtttgagttttctgttgggatcaaggcagtcagcagccatcaagggttcttgcacttgggcaaagaagtcattaatggtaatttgtatcagcaattacagcatctacctcatttctttctttcagtcgcagcgttcaaaggcaggctttattctccttcttgctgggtactgcaagctacacttgcctctcagttttatgtcttcctactccagctgtctggtgtggattttccttctgctccaagcttccttcatttcttcctccttatgcttcctactcttagagtggcctggaagtgttgctgggccagaactgcccccctgggtcctgtccacaggggcggcctctgcccatgctgactctcctcgtgtcattcttgcatgggcacatgtccagggggagataatatgtatgacctggtctatcctgagcacagtgttttaaatcaagaaattgcatgtttattgaagttcagtagaccaaacaagacctaagggtcaggaactcttaaatgtttatcccagtgtggactcagatgtattggggaattttagcaagtcacttaacctctccgtgtccctgtgatcttcctatatagtactgatacggctattttatatgaatctagtactttcacatcttcatgtgacagttttattgaaattaattttcaatagagaaacttgttgccttgcagttttttttatttctgatttttaatatgtatttttacttatgttgatttagaccttcccatttaatagtaacctttcaatgtggttacatttcttaaagagtatttatgttcagtttgaaaccacacaaatttaaattttgggaggctttcttcttcttttacaagtaatgtaaaattgtagtgaagctattggaaaagaaaaggatagaaacatgttagtgctttgacacagcgggagagaattttggaagagatattctaccaactacagatggaatcttcatcatcatgtagacttcagatattcttttagaaaactttacatttacttataatctaaaccttacttgtttaaacaagtcatgaaatgtatagcttaataattgcctttaagaaaattgttgcccaaaacagaaaccgtattgagtatgtaaagccaagtttagttaccaagacctactgatttcctttcatatatgtatggtcacatctctcacctcatctgtcctgtttcttgttttactagtggtcctttggcgtgctcctctgggagctgatgacaagaggagccccaccttatcctgacgtaaacacctttgatataactgtttacttgttgcaagggagaagactcctacaacccgaatactgcccagaccccttgtaagtagtctttctgtacctcttacgttctttacttttacagaaatgcctgccttcaaagggtctcttacagcatgtctttctttttggaacagatatgaagtaatgctaaaatgctggcaccctaaagccgaaatgcgcccatccttttctgaactggtgtcccggatatcagcgatcttctctactttcattggggagcactatgtccatgtgaacgctacttatgtgaacgtaaaatgtgtcgctccgtatccttctctgttgtcatcagaagataacgctgatgatgaggtggacacacgaccagcctccttctgggagacatcatagtgctagtactatgtcaaagcaacagtccacactttgtccaatggttttttcactgcctgacctttaaaaggccatcgatattctttgctcttgccaaaattgcactattataggacttgtattgttatttaaattactggattctaaggaatttcttatctgacagagcatcagaaccagaggcttggtcccacaggccacggaccaatggcctgcagccgtgacaacactcctgtcatattggagtccaaaacttgaattctgggttgaattttttaaaaatcaggtaccacttgatttcatatgggaaattgaagcaggaaatattgagggcttcttgatcacagaaaactcagaagagatagtaatgctcaggacaggagcggcagccccagaacaggccactcatttagaattctagtgtttcaaaacacttttgtgtgttgtatggtcaataacatttttcattactgatggtgtcattcacccattaggtaaacattcccttttaaatgtttgtttgttttttgagacaggatctcactctgttgccagggctgtagtgcagtggtgtgatcatagctcactgcaacctccacctcccaggctcaagcctcccgaatagctgggactacaggcgcacaccaccatccccggctaatttttgtattttttgtagagacggggttttgccatgttgccaaggctggtttcaaactcctggactcaagaaatccacccacctcagcctcccaaagtgctaggattacaggcatgagccactgcgcccagcccttataaatttttgtatagacattcctttggttggaagaatatttataggcaatacagtcaaagtttcaaaatagcatcacacaaaacatgtttataaatgaacaggatgtaatgtacatagatgacattaagaaaatttgtatgaaataatttagtcatcatgaaatatttagttgtcatataaaaacccactgtttgagaatgatgctactctgatctaatgaatgtgaacatgtagatgttttgtgtgtatttttttaaatgaaaactcaaaataagacaagtaatttgttgataaatatttttaaagataactcagcatgtttgtaaagcaggatacattttactaaaaggttcattggttccaatcacagctcataggtagagcaaagaaagggtggatggattgaaaagattagcctctgtctcggtggcaggttcccacctcgcaagcaattggaaacaaaacttttggggagttttattttgcattagggtgtgttttatgttaagcaaaacatactttagaaacaaatgaaaaaggcaattgaaaatcccagctatttcacctagatggaatagccaccctgagcagaactttgtgatgcttcattctgtggaattttgtgcttgctactgtatagtgcatgtggtgtaggttactctaactggttttgtcgacgtaaacatttaaagtgttatattttttataaaaatgtttatttttaatgatatgagaaaaattttgttaggccacaaaaacactgcactgtgaacattttagaaaaggtatgtcagactgggattaatgacagcatgattttcaatgactgtaaattgcgataaggaaatgtactgattgccaatacaccccaccctcattacatcatcaggacttgaagccaagggttaacccagcaagctacaaagagggtgtgtcacactgaaactcaatagttgagtttggctgttgttgcaggaaaatgattataactaaaagctctctgatagtgcagagacttaccagaagacacaaggaattgtactgaagagctattacaatccaaatattgccgtttcataaatgtaataagtaatactaattcacagagtattgtaaatggtggatgacaaaagaaaatctgctctgtggaaagaaagaactgtctctaccagggtcaagagcatgaacgcatcaatagaaagaactcggggaaacatcccatcaacaggactacacacttgtatatacattcttgagaacactgcaatgtgaaaatcacgtttgctatttataaacttgtccttagattaatgtgtctggacagattgtgggagtaagtgattcttctaagaattagatacttgtcactgcctatacctgcagctgaactgaatggtacttcgtatgttaatagttgttctgataaatcatgcaattaaagtaaagtgatgcaacatcttgtatactgatagtggttattgccagtcatgcttgattacctgcatttgcataatgatagaggaagcctaagatggatttcacctggctgcatagagctcatccatgtaggagagccttagtcaagtgaatgctgaggaagtagtaaaacagcatgcatccccgaatctcaggaagtctctgtctttccaagggtttggtctaagttgctgattacctggatttttctgacgatctttcaactgctagagcatctggttcctgttttagcatggtgctcttctccagcaaggtgtgtccttagactagaagacacaaaaatggagcagcagccacaccattggcgcacagatacctaggtgtgggttggagagagaggccttcttgccccatcaaaactactctttatctacacaggtgcccacccttttacccccagttaccagagaaattaccttcaggttatctccatgtatattcttgtaatggtaagggaattcaaaggtgataatttcagccatctaagaattgtgtgacacattgggggtaatctaattttaaaagaacccaatttaaaataatgcctacaaaatacaatggacactgatcctttactgggagataattcaacccccgctcacggccaaactctctcccactcaaaagatgcatttccccagaaagttcaatccaactctctcccataaggagaacaacctgtcatctttacatctctagaatccggcacttagtagattctcaaataattgctgaactgaaacagcattttcttattccccatcactttatttatttatttatttatttatttatttatttatttttgagacagggtcccactctggcccccccagctggagtgcagtggcatgatcttggctcactgcaacctccacctcctgggttcaagccattctcctgcctcagcctcctgagtagctggaattacaggcacacgccatcacgcccagctgatttttgtattttagtagagacggggtctcgccatgttggccaggctggtctcaaactcctggcctcaagtgatccacctgcctcagcctcccaaagtgctgggattacaggcgtgagccaccacacccagcctactttaaaccaccatggacagagttattgcctatgtagctcccatgatgtttggagaacactaatatggagaatgcagacttttctggggaaagagaaatagaaagatagacctttaagaagtttggcttggtgctacgcatttttaattatcacagggttttcgcttcacgatataagcatcaattatatttttgctcgctgacctacacagtggattccatctttaaagaaatagggagaagggatatataacgcgtagaaatacatcaaatgcttgaatgctgacatctggcattgttaatctacctgatttagttcagaaaatgagttagcattatataaaagaaattgattagtattttatttaactcaacgaatatttatcaagcacctatatatgtcagacactgctaggtaatggggatataaaaataaacagtccctctcaccccaaggaatttgatgaaacagacaaaattacataattaatgaatattaaaaattattcatttcttagatttgtgagttgtcttgaagagacaccacagtttaaacatacacaaagtgcaggctcctgggcaacagaccaagccctaactcagattgggcaacatattggacttctctaaacctgtgttctcatctgtcaaatacattaatcatggttacccccacaaagttgtttgaggactttaaaaaaaagtgtataaaggcacctggcacaccatagttgttcaataatcataatatcattattatctttagtcttagacaataaaagcccatgtataggtagccttagttggctaaagggaaatgaggcttggaggggcattacagatgtttaaatccaaattcttaccccattctttttgtttttgttttttgtttgttttttggtttttgttgttgtttgttttgttttgtttttgagacagagtctcactctgttgcccaggctggagtgcagtggcatgatctttgctcactgcaacctccacctcctgggttcaagcgattctcctgcctcagcctcctgagtagctgggattagaggtgtccaccaccacaacagctaatttttgtatttttagtagaaacggggtttcaccatgttggccaggctggtcttgaactcctgacctcaggggatctgcccgcctcaggctcccaaagttctgagattacaggcatgagccaccatgcccagccaacttcttaccccattcttcacctcacacctgctttatatacagtagaaacagctgtgattctgcctcatcctgcatatgacagtgagggtgagagaggagaaaggtgacaagacagtggcactggcaagagaactccctcacttctttctctacactccccactatcactttaattacttctcctgtgacagattccttttttctgttttagcctttagacctggaatacacaacagacatggaagagaacattctgtctaaatgacaggcatgttgcatgaaggtgcaagaataagagccatagtcttcagtattggtgtctagaaattattattgttcctcatttttgctcaaatgttaatagatggttaatgatcattcaggttgaagaaaaagtaaactaagtacagtattgttttagttatgtgctatgtgtttgaagatgaggaatacatgactagacacacatagcaagttacacaggcacacatgactcactgttgtagcacttcagacagtttcaagacacagagaggtatgcagacgttatgccccaaaggaagaaatgcttattgctgtttttctttttcatatttgaggggttctttcaggactatctcaattccttatctatcaaagaattggaaagaacttcagtcataaaccaatgaaatatttcagttggtgaattgaaggtaataaaatggatgcttgcccaaactgtcctttgttgtaaattattccagagaactagattacgtcagccaaagatattgatcacaatgctgagaggtttataactactattaacttaccatgtgaccccagggcagaaatctaggaaaattgcaaaagcatatctactgtaatgaaaagcccatcattaataggacttactatcttgtcatccaactagtactatgttggcttcaaggcaaatatttaacaaacatttgaaacagaaagcacttctgtcttctcccttttatcttccattgatgttcccgagctattctgatgaatgtgtttttgttcttatcaataaaacatgtaggttaaaataagtgaatatatttataattattagcctatataaattagcatccaaatattgaaatagctcctactcctttattattactatcattattttaataaggagttagctcctcatgtagaccagtttagaatacggctcaagtccaattctcctgcgtagttaaaccctacctggttaagcattctgaaaactagttactcttttttttttctttttttgagatggagtctctctctgtcacccaggctggagtgcagtggttcaatctcggctcactgcaaccaccacctcctgggttcaagtgattctcctgcctcaacctcccaagtagctggaattacaggcatgcatcaccacacccagctaatttttgtattttcagtagagatgggatttcgccatgttggccaggctgatctccagttcctggcctcaaatgattgccacctcagccttccaaagtgctgggattacaggtgtgagccaccacacccggtggaaaacgaggtactcttagagaagcaattctgagatgaaaatggccatatttagaatgcataaacagacatctctgatttaaattaactactaatttaacgttatttttgaagcactgggcccaaattacaatgagaattaattcttattcctttcttgaaaagaagccctttgtctttgtgcattcaatttttcactgtcacatgagtacattcttttcaccgcatgagtcccaggctggcagaaacatccactaatccttagacctcttggctggaacgacaaaaatgcataaaatcttaccaggccaaaagagatcaactttaaaaatctttggcatccaaacatgtcagaactgtttttcgctggttctgcaaaccatttgtgttcttcatttatggtccaggggatctgtaatgtcagttcctacttttattgggcagcctggaatttttaagcaccatatttcctttacctttcttggtggtttataattttcaccgctgtttttacgagttttcttctctatgtctctaagcctaagtgtggagatgtggtaatagacagcctgctctttgccaatcaaagcccttactttgacgttggccactttgttcctgtgacatctgctctttccattatagacaaactggggctttccttctgcagaactgtgactaaacaaccaccatattcatcagtggcaacaattcttgtaaacaagaaacgctgaatacaaaggctttgtgaaatcctgcccccaagaggccacatgtctaaagtcagtcacgtggtcctcagaaatgattttagaagtctcagtaaagaaaaattacagagacactcaaatatcctagtgtgatactgctgtaaaacttcttctaattttttgttaagctgtgagaaagggcctatggaaacacctggatgaagcagcaaatcactgtcccaaagtcactaaaaatcatatttcagaaaggaaatatctagcgttaaaacaacatagatgcatttttgaaaacaaattgaattgagaaaaataataatgataacaataatgatctaatcccaggacatgtcacaggaattaatgactgactaaaagctaatggtctaaggtaatgctctcaggaattagtcttgcttattgaactgctattgttttagtaaacgaatgcttaaactgacagaaagtaaaaaatcagggctgccattatggagcctggttgattcaaagtggggcagggggagaagctaaagcaaaaaaaaaaaaaatgcatcatttgatcatttgctgttcttactcaattttttaagttcgtttgtcgttcacaaattatagattctttatcatttttttctttcatgtatctgtatgtacttttacttttgtactttaaggatgtgtttacttatgcattgttttattgacagagaagtaatctgataataaaaatgcaactccctctagtgtaggcatatcaaagatctaacattctgtttgcctagaatcgttttattttaaatactctgatctgaagaaaatgtggatcctcggccgggcgcagtggttcacgcctgtaatcccagcactttgggaggccgaggtgggtggatcacctgaggtcaggagtttgagaccagcctggccaacatggtgaaaccctgtctcctactaaaaatacaaacattggctgggcgtggtggcgggtgcctgtctgtaatcctagctactcaggaggctgaggcacgagaatcgcttgaaccccggaggcagaggttgcagtgagccgagattgcaccgctgcactccagctcgggcaacagagtgagactttgtctcaaaacaaaaaaaacaaaacaaaaaaaaagaagtggatcttccatgtgggctttagaatagtgcctcaaaattatacttcacttagaacttattactcaacatcttatttcaagagtattctaacagctgacttcttgattctacctttccgtattgcctcttccttataaccccaaaacagctaccaaaattatatatctgatcacttcactttcctgcttaaaaacctatgcccattcctagatgttctctgtgcagatcctttgttgtttcattttgtttatttttattataaaatatatttttgaggaaaaaattttaaattggacaaaaagatataaagtgaacaggaaatatcctccgaccactttctctccccctccatcctcactccccatgggtagctaatattaatgcactttttcagaaatgttccactctgcatcagtggaactgaactaaaccagacactttagtacatccttcaataacctttgtcttattgaccgaactatgactcggcacacccttccccagtcaagaatattgttcttctacctctgtgactttgaactctcaacagaaatatccccctttggggtatgagccatataaacagggctagaccaagctctgtgaactaccccctcccccactgacttataatttgatattgcttcaaaccagtatcctttacctttgttttgctcaacttttatttaaatggagaggagattaaaatgattttctcttaataaaaaattaaagaaagagattcacttgtttctatttgccaaagcagaataaatatatttttaatcaacaaaatagtatgcttttctaaaattctagttctgtttttcaatggaaatttgcagtgaaagtttccagatgcttggaagttataaagagttttaaacttaggtaataaaaataaatcacccatttatgataagcagcactctgtgaaagattatttcagaatctcagctgactgacaacttttaggagactgaactgtacttaagtgtggcaaacatgcatcatagagatgggttgtttactgtagcaagttacttgccttcggtccaactgtccttttggcagaagcacaccaatctaattttgcctgttacataaagagccacatgtggaaacctgagtcgcctgacatcatgttactgacttaatccagtcataattcagcgcccagagagcggctggcaggcccacccaccccccactctcactctcgatgtattcatgatagcacagaggttagctggacacacttgggaatcagatatgctaggtcagactcatttccaccacttatcagtagtgcgattttggaccaattgcgtaaccctcctaagcctcagtttctgaatccataaagtagaaatactaacagtggcttcctcataagattgtgcaaagattgaatgagacaatgtgtgcaaagctctcaaagggtggcagtcattattgccggagaccttgattttactttttaaatttttattcaagactctagaataaaattacctccacagatgtccaaagtttggcacagttcagaaaagtctgaaggtaaaaatcatgaaaacagacattgattttcttcatcctttttggtagtatcaacctaatagaaactggaccagggtcctgatccagtctgactttactgcctatgtgaccttccacattacttaaaagttgtgcttttcttgtctataaaaaattaagattatacctcacagcattgattgtaaatattaaattgtgtaagattttacacaagtacaaggtgttattatggttcatcagaatgtaatttttttactttgaaaatctccgtagaactcatctgattcacaaaattccctctaaccaaccccagcacttcatttgctcccacataattgctggagttgtttacacaaatctgtactcagaatcaaagagctcaaggctggagaagtcagggaatctggccctgggcctctgcttgaacattctgggtgctggtcgctagctgacccttaaacaactccatgtcctctttggagttcaaagtttgggggtaaaatcactaccccctctcaaagataaacacaaatggagctccaaggtggtgtccggtgctaacatgagacatgttgagtgtgaatctcatcagagcagtgtttttccaacataataaactgccctttgttcaaatcagaaactgatttcactcgattttcccaaatcggccctgccaggtttccttgatttaattgtatattttttgtctgctgacaatggaaagcagaagaaaatagtctcgctaaggaaatgaaatattaccaagaaaaacaggcattctcacactgtgtgaggtggttttttttttcttcacattcaatttgtataagaaaaaaggtctctaccctttgaaacaacagcattattgcagtgactattaggtcatatctacatggcccaaaagaaaatgttggaaagaaaattaactagttcataagggtatgggcaacattatttttaaaaggaaatggttcttcatacatagagagaataataaatgggagcaaaaaaatgcaagttaggcaattatttaaataattccaattttaaaatatgtacttaactaaagcatccgtggagttcaggtaaaatcatttagagggaacgcaaattaaccaaatcactactgaaattcttcactttttaagctaaaattgcttgttcttgctttaataccagagaagacctgagtcctggttgactgttagtgaggagttgtatcaaaagaacaaaggtttgaagccagttagggccaggtgcctatctcagctctgccatctactcatcatttgcccatcagcaaattcaatttttcatttatttggtttaaaaatattactgagacccttctacgtgataggtgctattgcaaagaaggaagatacagcaggcaatatactagccaagcctgttgctcccaaggggcatttattccaaagcagggagaaagaaagagagacaaaaggcagggggagggaggaaggaggggagaaaaggggaaaggaaggaaagagaaaaaagagaaagataagagataaacaacaaaactatcaacatttggtggtatgaagccatggaaccagaatgagactatctagggatcggtaccagagagggccaaggatgcagccttagggcacaacagtgcctagaggtcagggaggtgagattgaagaggccttacttatctcgtcataaaatgctaggttatcacctacaaagattttttttttttttgagataaggtcttgctatgtggcccaggctggagtgcaatggcttgatctcagctcactgcagcctccacctcccaggttcaagtgattctcctgcctcagcctcctgagctgggattacaggtgtgcaccaccattcccagctaattgttttttttttttttttttttagactgagtcttgctctatcgccgaggctggagtgcagtgatgtaatctcggctcactgcaacctctgcctctcaggttcaagcaattctcgcgcctcagcctcccgaggagctgggattacaggtgcacgccaccatgcctggctaatttttgtatttttagtagagacggtgtttggccacgttggccaggctagtctcgaactcctggtttcaagtgatctgcccacctcagcctcccaaagtgctgggattacaagcatgagccactgtgcctggctgatttttttaaaattatgtacattttgctactagcctattaaagatacccaacaaatgttaatttcttcctttttttttttaaatcctctccctcctcaccaactcccaccatgcaaatataattaatctctggttctaaaaaaaagacaactgagctcctgcataccaaaggaataaaaaactaacacttcctttagctcaatttaatctaggccccactgaatgtaatagtgagcaaagaccatacaatagcaaatcattatagatcacaactagtaatcccaaatgacaggtctcctctgttctgaatttcatttcattgaaattgttccaaagtttgcatcttaaattacacaaattatattcactcctgtcttctattttaaaaggggaaaattgtgcattcatttacctgttccctttaaacatcttaactcctgcttacacttgtatgaaagcattgatcttatcataattagagaaagttcctaaaaacaaaaaaagcaatgacacacaattaatctacagtgtgtatatcagaattaggttcagaaaatcccaaaacaactgtagcttacaggagatgagctttttctcttacacaaaacaggttggaggatgggcagttgggggctggtgtagaagctgcaggatgttggcagggacccaggctcccatccctctactccactatcccaaggcatgtcttctatcctcaaggtcaccttgtggtccagatggcttcctgcccttcaggaaggaggagggaaagcctgagtcaacacactttacaaaccttccttataatagaaggggttgaggaaggttgtgtggaagatgcttctgagttgggcccagatggacaggtaggaaaaggacatcctccatagagtggatcatgtcagcaatgaagtcagaaaagtacaagtatggttaaggaacaagaaagattcatctgaatataataatatttgggaaaaatagtaatgcgtgtattgaagatgagccttggtgtacaattgactataagcctccccgcatataacagaatgattctcttattttctcatgatctggggaagtaggtttggaaattcaagcctggggtggagtaataggaaaatataatcagaataaagaggatgagttttttgttcttttggtcttccagcccctcagctctggccatgccaacgcacccctttccgggagtgagtccacccagaacccttcgtgcccatggacatgcttcaatgctgtgcactgggttatctctcttggaagaacacaaacacacaggctggcgcacagtaagcactgcagaaatattgtggatgaagaatctagaaactagggtgcatgctccaggagtgtagagagagcccaaatcaagatgcacctttaatatcactctaaggtgttaggaaatggggaatgaggagaggctttcaaaacagaggggcaacaaaatcagaactattatttggaatagtaactccaacagcatgaattggaagaggaaataccttaaaagatgagttaggagactatttcattcacacaggagggtctagataactaaaacagaaacaacagtcatattgaagaagactggcaagaggtcagcatcccatgatcgcgctgcactgttgctttatatgattgtgtttgatggcacgattgtttacaacccttgactttcttccctgctttatcattagcattactttagaataatgaagcctgttccatccattaactccactaacatttgatctccccataggttgaggttaaaaattaattactcttccaacatattgattacatgactataaatataaaaacagaactacagagtaactacagggaccctttgtttaaatagcatgtttgctctttttaaaggaggtaattaatggcaaaggactttggaactggaggaacatgctagaaaagcaacccttgagtgccatctagtgttgacaacacatttaaatgtagtgtatcaaagaaaggtctggtttcttacactgtaggtgacttaattgttgaaagcaggcaatgtttgaatagtaaaaaaccaaacttaccctgcctttgttgcttgccacctgggtattaacatgaatcttcatttttgaacttcagtgggaggaagccttcatttcagcttctaggtcaaggtgcgttaacagaattggagggcattgagtttaactcacataactctttctttttgtcattccaggaaaaagttacccctaaggtaaagctagcatgtaactcctccttttcctcccttttaccagttagtttcagactatttcacctaattaaaaatgaactcataatatttcatgaattaaagaatggagaacatagaagaggttaagaactggtgttgaaatctcctgccatggaaattcattgttactgaggtggctcatatatcagagcactgccttctgcggacattaaaattcactttgtttcgtgtccctaatactgcccagcccttgggaagcacgaagctgacattgtattaggcaattcacgctgacctaataactcaaagcaatcatcactggtaacttaaagtgactacactccaaaagaaatagagcctaaggtcacagttataaatcttaccacaggaaggccaaagattataatctttatgccaagtgctgcagattcctttctgcttaggagagtcatatttcaaagactttactaatctgaaacctataggtggttgtgacaatagcagatatggcttacatgacatcaaacccacattttaaagaacactgggtaaatcagtaaaaaaggggcaattatatttattatatctgcagccaagactgtatacttttaccttcatactatactgaaatgcaatatcataattgtttttgaactcaaaggcctaacatataataaaagcatagttaactaaggaggcgtgtgatcctcttatcagtgtatatttgcataatttgcaagcagtctctgagtttgctatgatgatgtgtaaacagagggtatttgttcagttggaactttgtgctgtggagactaaagtcaaaggtttgatccctaatcagggcagacagcttcactgttgggtgactgaaagcactttatcattatgcttcctcaagatcgaggggcttcaggacagtgaacatgtaagttgcccactgctaaagaaaaacatgttttaaatgtttttatttgacttttttttatataaggaatgtatgccttctttgtgcaaaataagatgtgatttttttaaagctaacattcttgcagactctaacaatctcctcccgcatcccctctgttcccatagcttctctcacctccatatttacaagcctctcatttttatagaaagatatacacatatgttgattttagagttttaaataaaaataggatcatgctgtatacataatttgcaacagtttattttgactttgcagcatatcacaggtattcctccagtttataattcagtctttctcattgctacctgaccatctgtagaatggctgttacaatccactcaggctgtttccagtatttttttttggtttattttgtttactgttacaaacaatactacaaaaaaacttttacgtataatctaatatactggccttttattctaggatacagtcccaaaagtggggtcagtaaatcacacactgtttgtattttattagatattaggcaagttgttttccccaaaggctgcaccttttcacactcccaacgatatttgaaaatacttatttccctattttgtaccagcttgggacatcagcactctttttcattactgccaaataagtaaacaatggtttcttactgttgtcataatttgcttttccatgattaacagagaagttgacttcctgtgtttatgtgttttgtagccatctgcatttctttaaattgcctttccacagcctttgccccattttattctttcctctattttttattcaattgtttgtctttcagcaggtggcaaactcttcttgtaaaatagatatattaaccctttggctgggcgcagtggctcacgcttgtaatcccagcactttgggaggctgaggcaggcagatcacttgaggtcaggagattgagaccaacctggccaacatggtgaaaacctgtaactactaaaaatacaaaagttagctggacgtggtggtgcatacctataatcccagctactcaggaggctgaggcaggagaattgcttgaatccaggaggtggaggttgcagtgagccgagatcacaccactgtaatccagcctgggcagcagagtgagactctgtctcaaaaaaaaaaaaaaagagaaagaaagattaaacttttgtctttacctttgtctttattacaaattattttcctgacaatcatttatcctttgactatgtttatgtcttttgccatataaaaattttaaatctgtatgtaatccaaaatatttgtcttttctggcattatgtcctctacccttaaaaggtcttagagagtcttcctggacccaatattgtagaaaaacaatttcaagtacacaccttaacgatggtggacttttaactccagggatctcaaacaaacaaccatagaagtctggcaggttatggaaagttatgatacccaaccaataagaaaaatagggtatactgggggctgtgataaaatacagcatgtacaccccatctaaaggagacagtcagtactgtcaacctcaaataaccaaaaggatcagggtttaatttaaagagagtttattcaagcacaaagtttgaagatggcccacatggaaacacaaactccaaaggaatggaatcagtgcttcaaaatagagaagttaaggtttcacttattcatacagaatcagagagtttttagcaagattatgacatttttcatacaaggttgatgcatagttacagcagtttaatatgttacaggcagcatttcttttgggaagatacatttaacattttttacagagagtgtaagagtcatgagatttttgtcatgtgttctaagcaaagtaggacaataaagggaaagttaatttgtaataaggaccattaactaagaaagcaggaagtttttgtccctgacgtcacttaattctctccagtcactgtacagaacaagaaaaataaaatagcaagttaatctataatctgagaaacagaagttgtaactacatgtgactcagatcacagtcgcatctctttcaagacttaaagtgtttgagggattccatcagctttttttttttttagatggagtttcactcttgttgcccaggctggagtgcagtggtgggatcttggcttactgcaacttccacctcccaggttcaagctgttctgcctccgccctccaagtagctgggattgcccaccaccatacccagctaattttgtgtatttttagtagagatggggtttcaccatattggctaggctggttttgaactcctgatctcaggtgatctgcctgccttggcctcccaaagtgctggaattacaggcgtgagccactgcgcccagcctccagcagcttctaagttatatttattttcatagttctaaactccagtcaagattggcccttgagtaattcaggctaaatgttaccacatcttcttgtttttctctctgagaaaagccagctaaccagatttttatataaaatttcccaactttaaaatatatgttaggcctttttattatttatttatttggaacagggtctcactctgtcacccagactggaatgcagtggcacgatcatggctcactgcagccttgacttaccaggctcaagtgaccctctcacttcagcctcctgagtagctagaaccacagatgcatgccaccacacttggctcatttttaacatgtttttgtagaggtggagtttcactatattgcccaggctggtctcaaactcctgggctcaagggatcctcctgccgtgacctcccaaagtgctaggttcacaggcatgagccaccgtgcctggccttaacccatttttccccccgagactgagtcttgcactatcgcccaggctggagtgcagtggcattgatcttggcccactgcaacctctacctcttgggttcgagcaattctcctgcctcagtctcccaagtcctgggattacaagtgcgcaccaccacacccagctaatttttgtatttttaatagatatggggtttcaccatgttggctaggctggtctcaaactcctgaccacatgatccgcccgccttggcctcccaaagtgctgggattacaggcgtgagccaccgtacctggccaacccattttttaaaaaataaaattgctcaggccacaccaaatgtgtctgtgagcccctgacataaagcttagttcctcatggtacttgcgctatgagagaaaaaaaagccaaggatttactatgcatcgggcattgaaactcatatacatcatttttttaatcctcaaaatagcttaccacttagtgttagtatgatcattttagagataagaaaactgaaattaaggatggattaaaaatttatccacgttaatcagctagtaacagagccaagatttcaacccagtttttccagctctaaagagtagctcttccaatcttatcatgctataactctcacgaaattccaaagtagaaggtcatctttattttcccactttttagaaagtgaaccgtaaagatcttaaagggcatctccagcattgtttgaaatgtagaactccgccgggcacagtggctcacgcctgtaatcccagcactttgggaggctgaggtgggtggatcacttgaggtcaggaattccagactagcctggccaatatggtgaaactccatctctactaaaaatacaaaaattagctgggcatgatggcaggcgcctgggattccggctagtcaggagactgaggcaggagaatcgcctgcatccgggaggtggaggttgcagtgagtcaagatcgagccactgtactccagcctgggcgaaagagcaagactgtctcaaaacaaaaaaataaaaactaaaaacagaaatataaaactagatgagactttgcacgtggcagagatgaagattactacccaattcagtgttaacctcaaaattaaaattgtcactggacatcagggaagactcttccagtgtgaagtaggggaatggcatggagttctcttgggataaggaggtggcagtggctgaaaactcaaaattaaccagcgccaacctcaagacctagccttggtactgaggatctgcccttcagcttcgtgctcccataggagagcctcagaaagatgtgtggccagataagctacagagattgcagacaaaccaaaaagagaatagagtggcaatcaaagcagttcctttgagaaaggaatgtcatttctctccttctgagaaactgaaaacccatggcaaagattaagattttgccaaacatgggaatttgaagaaagcagtatctgctccataagaacttttgtttgaatgaagtaacctgttaataaggacagataatattgatttgttttatgtgagtttgcctggggagttaaccacggtcataataatttttaagtttccgggttctgaggaccatggcttctgttcttggtattactcccattggttttcttttttaaaatatattgattaaattaatccaggtcttggaataacatattctgcacagaaatcaaagagacagaaaaagtgataaataattgatgcagcctctgatatgttaaacatgcaatgttgaaagaaaatttttctcctttgacatacggtaagtctgagcatgtgtcataataaaaagagcttgccacattcttaaggtttggaagaaaactaaaaatgaaaaagaacaactttttatgttgatatcatgatcttcagcatactctctgccaaaattacttcctatccagtgatttcataagatgtagcaacgttaaatttttatcttttttctgcaattcaggtacgagttaagtaaaaatctaaacaagacattcttgggcctaagatgctccccaaaagagcatttcaaaagaaatttgttgccacttgattttataagtatatgacaaacttgaatgaaacgaagttagagcaaagaactggtccaaggcctggcttagtcactttttaacagttagcatttattgagagattaccatgtgccaaacattacataaaatgctttatattgattaacaaatataatctttaccccatctgatgagctacatactattattatcctcattttgattaaaaaaaaaaaaactagtccacagaggattatagaattcacccaagattgtattactaccagaaaccaaacacaggtagtgttcctttaggaattcttgcttttaatcaatgtcctataaacagataaccttaagccctttccttcctaagcctcagataacttgtctcaaacatgaggataataaaaccgattctacctatttcccttggttattttgaggaacaagtgagatcattacatgtaaagatctcaataggctgggcacaatggctcatgccagtaatcccagcactttgggaagccgaggcaggaggatcagttgatgccaggagttcaagaccagcctgggcaaaatggtgagaccccatctctacaaaacttaaaattaaaaaattagctgggcatggtgtcacatgcctatagtcccagatactcgggaggctgaggcaggaggattgcttgggcacaggagttcaaggctatagtgagctatgatcatgcccctgggcaacagagtgagactgtgtttcttttttaaaaaaaaggtctcagtaagttataaatcattacaatctttagcttatttcctagttttcagaaatgagcaagctgaaccctaagtagaattcttaagtagatgtcccttttcaacagaagggtttctatgcttaggcaaatcacataatattgaccttacaacattattatactttgaaattggttatgatatcctttttatagaaaatataagagcgctatgtggaaagcagagttgaactagagtcaagagggcccaacactcagctcagcttttaccaactcatattcacttactcttcaaatgtcccatctgtaaaacatgattccctatctcacaggttattaaagttacatacctgcatgtgctttgtaaactactgaacaagaagctgtcctttgtattactgccatgtcaaagaagaataatgtgcaacttacccaggagaaggagaaggaaaggatgtcattggcagggagctagccccaggagccacagtgtcccaaagactgtggagagactgaatttgctgactttgggtgggttattttgggggaaagcattgttgttttagtcacagttggctgggggtatttccttgacttcggcccccaccttccacatggaaattatgttttcattcatcctttcattcatgtaccaaaatattggtgtgcatctatcatgtgcctggcattgtgttaattatgttaaacactggggacacaacggtaatgaaaatagagtccctatcctcatagaacttacattctagagagggagacatgtaacagacaaaacatgaaactaagttataacagcatgggataagtgctagaaggaaattaacattgacaggcgagatgctggtgtgggaaagacccacttcaggtgggcagtagcaagaatgggaatgctgaaggtggaaaaggacagacagatttgaggcatcttttaaaggaagaatggacatacttcttgatggatctgatgtagaagacgaggaaagagaggattaggagatgactactaggtttctgcaataagcagttaaaggacaaggatcctgtcaccatttactcatatgtggacaattggaagaggagggtgtggaagtcaataataccatttggggtatgtcacttttcaaatgcctgtaagacattcaaatgtcaaattgaatgcatgagcccagaacccaaaggaaagttctggattgagaaaaaggtgggatgtcatgagcttatagacaatatttaaaatcatgttaacattctgtttaggccaggcgcagcggctcatgcctgtaatcccagcactttgggaggctgaggtgggtggatcacctgaggtcgggagttcaaggccagcctgaccaacatggagaagccctgtctctactaaaaatacaaaattagctgggcatggtggcgcatgcctgtaatcccagctactcgggaggctgaggcaggagaatcgcttgaacctgggaggcagaggttgcagtgagccaagattgcgccattgcactccagcctgggcaacaagagcaaacctccatctcagaaaaaaaaaaaaaaaaattctgtttaataagtctgaaaaaccttcaagaacaggttttctttaatcccaaatagtgaaatttcaggatggcaataactttcaaaaaatgtatttccacccagaaattgagagggaattcttaggtcactgcaaatcatcccagtggagtaacccaatgctccagtgagaaaatggtgtaacagaatgagataggacttgaactaagaaggatctgggcttgaattccagctctgccattgctaatgatgtggccttatgaaagtttctttacccgtttgatcctctttttaattatctatacaatggaaatttaaaaatacctcgaaggttgttgtgaacaatgtaaataacatctgcaaaaatgtctagcacagggtagaatcagtaagtagtagcaatattaaatttctctctttttttgcacagtaaaatgtcttgaaagacacaacctctacttgcaggcctccttctttcctggattcactccagtcatgtttcccatctctcattccaccggatctgctcttgtgaaagtcaccaatggtgttgattctgccttcaattttgtactccttctcaacagcatttaacccaattgatcacttcttccttggttagcttttttctcagcttcagtgacaccacaccatcctgattttccacatatgccacagaaagatccttctcagtctcctgtgcttaactgttttcccaagcagaaatgctaaatgttggagaacttaggctcagtcctagagcctcattttttccatcctccctccctccataggtaacattatccagtcctatagtttaacatctgtcaaatcccaaattcacatcttcccttgaactctaaattcatacatttaattgtctctttggcatcatcatgtgacaagcacctccagtttaacaagtaaaaatagaactcttgaccaccaacagcccttcctcaagtcttccaccatccagcaaatggcatcattatccatccaatggtgctctgtcaaaatcctacctataagtacatactattagctccatccctaaaatacagccacagtctgtctcaactctgcttccaaaccccaagatcagggcaccatcgtttctcatggtttcaggcttccacttcaatccattctcccatacgagacattgtgaccttttgaaaacataaatcatgccatgtaactttcccatctaaaatctttccacggctttctgttgcacttagaatgaaatccaagttgtttaccacggttcgttaaggcttacatggttgggcctcagcttcctctccaagccgtctccttttaccaccccctccagcacactaccctcccccttcaccagtcttccttctttctgctaagcttctttctgcttcaggatcttaccctaattgtttcctctgcctggaactttctgctccagatctttccatcagctggccccttctcataattctcagagaagccttccctccatccagtctcaaatagcttccactctctcagcgatgccctattcatgtaaccctgtgttattttctttttattatgtgtatttacttgaaatcactttgttgatctatgtgtttacatctgtgttatctctctctcctccactagactatatgctccaggagaacaggaacggatttctcactcatctatgtatagcgcctagacagaactgacacataatagacattcaaaaatatttgtcaaatgagtgaatgaacgaattcacagtagttgtcattgccctgctatgtacaaatctgtggcacgggtggtacggaataccaccctctacttggttccatttttgccacctggccagctccttctgctttaaccaactgtgttttcttctctttatctgcttacacccacattttatttatttatttatttatttatttatttatttatttatttattttaacttctattttaggttcagtggcatatgtgcaggtttgttacataggtaagctacatgtcacaaaggtttagcatacagattattttatcacccaggtaataagcatagtacctgataggtattttttctgatccctttcctccttccaccctttaccttccagtaggccccaatatctgttgttcccctctttacgtccatgtgttctcatcacttagctcttacttataagtgagaacatgcagtatttggtattctgttcctgtgttagtttgctaaggacaatggcctccagctccatccatgttcctgcaaaggatatgatcttgttcttttttatagctgtgtagcatttcatggtgtatatgtaccacattttctttatccagcctaccatcgatgtgcatttaggttgatttcatgtctttgctactatgaatagtgctgtgatgaacatatgtgtgcatgtgtctttatggtagaatgatttatactccttggggtatatgcccaataatgggattgctacatcaaatggtaattctgtttcaagttctttgaggaatcgacaaactgctttccacaatggctgaactaatttacactcctaccagcagtgtataatcattcccttttcttcacaacctcgccagcatctgttatttcttgactttttaataacagccattctgactggtgtgagatggtatatcattgtggttttgatttgcattcctctaataattaataatgttgagcattttcatattcttgttggcctcatgtatgtcttcttttgaaaagtgattgttcatgtcttttgcccactttttaatggagttgtttgttttttgcttgtaaatttgcttaagtttcttacagtttctcgatattagacctttgttggatgcatagtttgcaaatattttctcccattctgtaggttgtctgtttactctgttgacagtttgttttggtgtgcagaagctctttagtttaattagattccattttccaatttttatttcggttgcaattgcttttgtcatcttcatcatgaaatctttgccaagtcctatgtacagcatggtatttcctaggttatcttctaggggttttttaattaattaattaatttttttattatactttaagttctgggatacaagtgcagaacgtgcaggtttgttacataggtatacatgtgccatggttgctgcacccatcaacctgtcatctacattaggtatttcttctaatgctatccctccccttgccccccacccctaaacgacaggccccagtgtgtgatgtacccctccctgtgcccatatgttctcattgttcgactctcacttatgagtgaaaacatgcagtgtttggttttctgctcctatgttagcttgctgagaattatggtttccagttttatccatgtccttgcaaaggtaatgaactcattcttttttatggctgcgtagtattccatggtgtatatgtgccacattttctttacccaatctatcattggtggacatttgggttggttcagagtatttgctgttgtgaatagtgctgcaataaacatacatgtgcatgtgtctttatagtagaatgatttatcatcctttgggtatacaccctgtaacgggattgctgggtcagaagtatttctagttctagatccttaaggaattggcacactgtcttccacaatggttgaactaatttacactcccacccacagtgtaaaagcattccctatttctccacatcctctccagcatctgttgttccctgattttttgatgctcaccattctaactggtatgagatggtacctcattgtggttttgatttgcatttctctaatgaccagtgatgatgagctgtttttcatgtttgttggcagcataaatgtcttcttttgagaagtgtctgttcatatccttcacccactttttgatgtgactgtttatatttttcttgtaaatttgtttaagtcccttgtagattctggattgctgacaaagggcttctagggtttttatagttttaggttttacatttaagttttcaatccatcttgagttgatttttggatgtggtgtaaggtaaacattggcctactggctagccatatacagaaggttttgtatgtggtgtaaggtagaggttggctcagtcctagagccccgtttttccatcttccttccccccataggttggcctctaccttttactacgcaccatttactgaatggggaatcctttccccattgcttgttgcttgttttttgtcagttttgtcaaagattagatggttgtaggtgtgtgccattatttctgggctctctattttgttccattggtctatgtctctgtttttgtaacagtaacatgctgttttggttactgtagccctgtagtatgatttgaagtcagataatatgatgcctccagctttgttccttttgcttgggattgccttggttatttgcaccctttttttggttccatatgaattttaaaatagtttttttaattctgtgaggaatgccattggtagttttataggaatagcattgaatctgtaaatcacttagggtagtaccaccattttaattgtattgattcttcctatccatgagcatggaatgttttttaatttgtcatctctgatttctttggacagtgttttgtaattctcattgtacagatatttcacctccctggttagctgtattcctaggtattttattctctttgtgggaatgctactgatttttgtacattgattttgtattcttaaaatttgttgaaattgtttctcagatcaaggagctttggggcagaagctatggagttttctaaatacagaatcatgtcatttgcaaacagggatacttggacttcctctctccctatttagatgtcttttatttatttctcttgcctgattgctctggccagaaattccaatactatgttgaacaggattggtgagagggggcatccttgtcttgtgctggttttcaaagagaatgcttccagcttttgcccattcagtatgatgtgggctgtgggtttgccatagatggctcttattgttttgaagcatgttccgtctatgcctagtttattgagaatttttaatgtgaatagatgttgaattttatcaaaagccttttctgcacctattgagataatcatgtagtttttgtttttagttctgtttatgtggtgaatcacatttattgatttgcctatgttgaaccaattttgcatcccggagataaagcctacttgattacggtggattggctttttgatgtcctgctggatccagtttgctactattttgtggaggatttttgcatctatgttcatcaaagatattggcctgaagttttcttttttcgttgtctctgccagggttcggtatcacaatgatgctggctggcctcatagaatgagttgggaaggagtccctcctcctcaattttctgaaagagtctcagctcttctttatacatctagtagaatttggctgtgaatccatctgtcctggacttcttttggttggtaggctttttattactgattcagtttcattattggtctgttcagggattcaatttcttcctggttcagtcttgggaggttgtatgtgtccagaaacttatccttttcttctagattttctagtttgtgtgcatagaggtgtacatagtaatctctgatgaatttttgtatttctgtagggtcagtggtaacatcccctttgtcatttctaattgtgtttatttggatcttctctcttttttttattagtctagctagcagtctatcttattttttttttccaataaccaactcctggatttattgattttttgtatggtttttcacatctcaatctccttcagttcagctctgattttggttatttctggtcgtctgctagctttgtggttggtacactcttgcttctctatttcttctagttgtgatgttaggttgttgatttgagatcttcctaactttttgatgtgggtgtttagtgctataaacttccctcttaacactgctttagctacatcccagagattcttcatgttgtatctttgttctcattagtttcaaagaactttctggtttctcccttaatttcattatttactcaaaagtcattcaggagcaggttgtataatttccatgtatggttttgagtgatttttagttttgatttctatttttattacactgtggtctgagagtgtggttggtatgatttggggcttttttttgcatttgctgaggattgttttatgtccaattgagtggttaactttagagtatgtgcaatgtgttgatgagaagaatgaatattctggcattttggggtggagagttctgtagatgtacaataggtccatttggtcaagtgctgagttcatgttctgaatatctttgttaattttctgcctcaatgatccctctaatactgtcagtggggtgttgaagtctcccagaattattatgtgggaagttaagtctcttcataggtctctaagaacttgctttatgaatctgctcctatgttgggtccgtgtatatttaggatagttaggtcttcttgttgaatagagtcctttaccgttatgtaatggccttctttatcttttttttttaatcttttttagtttaaaatctgttttgtctgaaattcagatagcaacccctgcttttttctgtttttcatttgcttggtagatttttctccaaccctttattttgagccaatggatgtcattgtatgtgagatggttctctcaaagacagcataccattgggtcttgcttcttcatccagcttgccactctgtgccttttaattgaagcatttagcccacttacattcaaggttagtattgatatgtgtggatttgatcctatcatcatgttgttagctgattttttatggagacttgtttgtatagttgtttatagtgtcactggtctgtgtacttaagtgtgttcttgtagtggtggtaacagtctttcctttccatatttagtgctcctttcaggaccttttgtaaggcaggtctgctgttagcctgatgaaatttcctttgtaggtaatctgccccttcttgttagctgtctttaatattttttctttcattttgaccttggagaatctgataattatgtgtcttaggaatggtcttcttgtgtaatatcttgcaggagttctctgcatttcctgagtttgaatgttggcctctctagtgaagttggggaagttttcatggataatacactaaaatatattttccaaattgcttgctttatccccatccctttcagggatgccaatgagttgtagatttacataatcccatatttcttagaggttttattcattattttttattcttttttcttgtccgactatttcagagggttctgagattctttcctcagtttgatctattttgctgctaatacttgtgattacagtacgcaattcttgtagactatttttcagctctattagatctgttaggttctttttatagtggctattttgcttataagctcctgtatcattttattgtaattcttagcttccttggattgaattttgatgttctcctggatctcaatggacttaatttctatccatattctgaattctatttctgtcatttcagccatttcagtccagttaagaactcttactgggaaacaagtttagtcatttggaggaaagaagacactgtggctttttgaattgccagagttcttgctctggttgtttctcatctgtgtgagctggtggcctttaactgtggtataaatcgaatacagtcagtagacttatttcctggatgttttcagaggatcgaaaatttgtgtagagtctttatttgaagctgaattattgtccttggtttcacagaggggtatattagcaaagcatttttggtgttgaagtttggggctgtgattcagtaggtggcacttaaacataatggaagtaggtaggcttttgctcagtcacgtggctcctctgtattttctcctaattgcagccatctacctttcagtgctctgaaagtgtaggtttctctcccacttgattgctggctacagatctcagcttggcacccacaggttgcacattgcagctcccgggcgatcttgggctttatgttccctccccagcttgaaggcaacaggggaaggaactttagcagtggttgtggcagaggggctttcacttgtctcttggggtttcaccccagaaagatgcagaccagctatcagtcactatgatcagcccagaatgggctggctgtgctgtggacccaagccggtaagaccctgcctggtaataagcagcagggtggatgacacctgggggagacaaactggcctctccttagggcaactgcagcttgctggaggtgtggctaaagcactcagggtttttgctccttccctggtcagcaggcagcaagggcagtaccactgcagtgacagcacccacactttaaatgttagtgtttcccaaggctcaagtagttattaaaattctatatcttttttgtgtgtgtgtgatggggtctcactttatcatccaggctggcgtgtagtggaacaatcatggctcactgcagcctcaacctcccagtctcaagccatccttccacctcagcctcctgaatagctgggaccacagatgcacatcaccacatctggctaaatttattattatttttttgtttgtagagacaggctctccctgtgtttcccaggctggtcttaaattcctgggctcaagtgatcttcccacctcaccctcccaaagcactgagattctaagtatgagccaccaggccctgcctaaaattctatcacttaaacatctcttatgtctttgtcttcttttgtttttctactgccttacctcaggctcttgttatcttttaccttaacctcttaaatggtctcctaattggcctttctctctccagtttcaccatttctaaattcaatttccaatttttctaatacacacattttcagttaacctccaaagtttccaccttttatacacggtcctaagtaaagtttgaaaaggacctcagtgattaggccgctgcctccatgagcaccacagttcacagctcttcgatactcacctatgctccagccactccaaaagacttttacatgtcctccattttcctgtctttgctctcatacagactgttccttcatctgtaaatgcctttccatcagcccccacccctcccatctgtctgggagatgttaaactcatactcttcctttaatacccaactcaaggatctcctcttctgcaaaatcttccccaatctaccaaattccacattggccctgatttttctgtgctgccactttccctaatacatacgtttgtaattttacttttcaagttatattacaattatttattaacttgttgccacattgtgagcttatgttttatttttgcatctctatcagtcttcctgggatataataatatgttactaataaacacttgttgatggagaaaataaagacattaaagataaatacatacagccactcattaaacgtgcattataaagaagttgcggttccaaattatcattttagaagtagccacagaagataagtcatacatagttactttttagtatttccaattcaaaaagtgatgaagaatagaaatcatatattctggaacccctacttaataatttatgttaaatctcaaacactttgaaatctggtgtttaagaactgatagtcatcacctcctctcttctctgtttgccacttagaaaatgaccagttaacaacattctttatttcacatgtatcttataattagttggtttaaaaaaaaaaaaaaagccagtaatctgtttttttgttttctttcttgagacagattctcactctaccactctattgcccaggctggagtacagtggcatgatctcagccctgcaacctctgcctcccgggtttaagcaattctcctgcctcagcctcgcaagcagctaggtggggctacaggtatgcgccaccatgcccagcttatttctggtttttttttttttttttttaagtagagttggggtttctccatggtgaccaggctggtctcaaactcctgaccttaggtgatctgcccacctagacttcccaaagtcctgggattacaggcgtaagccaccacacccagctcagaaatctgtttattatgacagttccaggttattttggaattcctggaccaaatacacaaatccattcttttaatagtccttggaaatacggagcatctgattagatgccaaaaggaagggagatgcttggtatccttttggtgggtcttgaaaacactgggaacactaataactgctagaactgttaaatagcagagtcaccactaatggtgaaaatgcactattaatataagcctcttttttgcagggagtggagagtcttttattccctaaaaatatctgaaagacgaaagcaggatatgcatctcaactgtagcataaggcctcttctggcccaaacaatcttccctacctcttaagatctgttcttcctaccattaaaattagcatattgtctttataaaatccctgctaaaaagtacctaggaaagtttctcccatgcaaaaaataattatcattactgtgttggccgctccgtttgtcagattttcaaagtgagagcaaaacccaaagagataggagtggtaagaaacaagaagctagagctagaaaaggaagtctgaaaagagaaggataagacttgaggcaaaattctgtctgcttttgactgatgattctcggttctccaaagaaatgcaacctttgttttgtgcttacttacttcagtgacaaagtgaggactcctgagttaatggtctgcaaaagcattgaagattaagagcaatagacagaattcctagcttggggtgggcttcacttacagagccttccatgagacctggctaaatgaaaccactctacattttcattcttaatgaaagtgtgagaaagtctgagaaaaccaagaactcttcctaaaatgtcagaactaggaggaaaatccacagtaccttttacaaaatgaaagtttaagtaaatgattgtacttgataacaatattagaatccatcctgcttctggcaaagagaactttgcctactgtaacaagtttggctggtctgctttttaatttctccatttcctgcttcctacactgccacttgtttctacctcaaaggtgatcagtcttcagtggcctgttctatgtacctaccattttgaacttgtaatatctcccattgatttcatgctgttctttctggaatctgttggctgtgggggtctgttctgctatggtatagtatgtgcaggcagttctgtgtttgtcttgtttcttgctttgtcacaagacaagtatttcattactgtggtgttttttgtttttttgctttgagacggagttttgctcttgtcgcccaggctggagtgcaatggcacaccctcggctcactgcaacctccgcctcactgcaagctttgcctcatgggttcaaacaattctcctgcctcagcctcccaagtagctgggattacaggacccagctaatttttgtatttttttagtagagatggggtttcatcacgttggccaggtcggtctcgaattcctgacctcaggttatttgccacctccgcctcccaaagtgctgggattacaagcgtgagccaccacgcccagcctactgtggatttttataggtcattaactcatgcatttgagactggggcaggaaataaataagatagtccttttggaaatacacagtaattgggcaaatccctacagaaagaaagatgcttgatgttattttggtaagtcctgaaaatacccaccaaacaagatgatcctggagcattttccagtgctagaaaagtaagaaaatcctaaaataaagatacatgtatatacattgtgtaaagatacacaatgatggggacataaaacctaactgaaagagtgcccagtagccaaagctggtacaatttgagcaacaatataaagaaatatcataggccgggcgcggtgtgtcagcactttgggaggccaaggcgggtggatcacgaggtcaggagttcaagaccagcctgtccaagatggtgaaaccccatctctactaaaaacacaaaaattagccgagcgtggtggcaggcacctgtgatcccagctacttgggaggctgaggaaggagaatcgcttgaacccggagggcagaggttgcagtgagccgagatcacaccactgcaccccaacctgggcaatagagtgagactctgtcacaaaaaaaataaataaataaaaataaaaggaaatatcatattataacctaaagtataaaataaatattcataaatcagtagtaatataaatgattgaataaataaatggaggagaagggaaaagtctcccatgcagaattccagataatttacatagcctctcctccctcaaaaagtcaagcataatcccccattccctaagtaggatctgagcatagtgacttccttccaaagagtacagtcatggaaagggggagagaatgagaactttacggtagagaaacctggcagacactacctcagccaggtgatcaaagtcagcatcaacaatgctaagtcatgttggtcgtaggcaaccttaatatgatatggtgaaaacagcacttgacctctgtggtcttcctgctgaaaacacacaaccccagtctaatcatggggaaaatgtcagataaatcccgaatgagggacagtctacaaaatatctaaccagtgctccccaaaactatcaaggtcatcaagagcaatgaaagtctgaaagactgttacagccaaggggacctaaggagacatgaggactaactataatgcagtgtcctagatgagatcttagaacagaaaaagaacgtgatggcatggcatggtggctcccacctgtactcctagcattgagacttggggtaatcagataagagaaattttatataaatgaaactatgccaacatgttactttctccagtttacatttattttccaataaatatttctcaaatgaccctgagtgatataatggtcaggacaggtcagcaggggaaaaatataggtagatacattttgtttttaaaaataagcttttacttttagaacagttttagatatacagaaaaatgtggccagttgtgatgactcacgcttataatcccagcactttgggaggccaaggaaggcagatcacttaagcccaggagttcgagaccagcctgagcaacatagcaagatccccatctctacaaataattttaaaaatcagccagcatggtggcgtgtacctgtggtcccagctgctcaggtggctaaggtaggaggatcacctgagcctaggaaatcacggctgcagtgagccatgattgtgctaccacactctagcctgagtgatggagtgagaccctgtttcaaaaataaaaaaaagaaaaaaaaaagaacattacctaaaaactgaggaaatctgaataaactagaggcttcagttaataatagtatatcaattttggtttaacaattgtggcaaatgtagcatactaatgtcatatgttaataatatgggaaactaggtggcatatgggggaacactgcgtactatcttcacattcttctgtacatcaatttttttttttttgagacagagtgtcgctctgttgcccaggctggagtgcagtggcgcgatctcagctcactgcaacctctgcctcccaggttcaagcaattctcctgcctccgcctcttgagtagctggaattacaggtgacctcaccatgcccagctaatttttaaaattatttgtagagatggggaccttgctatgatgctcaggctggtctcaaacccctgggctcaagtgatctgccctccttggcttcccaaagtgctgggattacaggcatgagccattgcacctggccacatttttttgtatatctaaaactgttctaaaagtaaaagcttatttttaaaaactaaatgtatctacctgtatttttcccctgctgacctgtcctgaccattgtatcactcagggtcatttgtgaaatatttattggaaaataaatgtaaactggagaaagtaacatgttggcatagtttcatttatataaaatttctcttatctgattaccccaagtatcgatttgtcatctgtagatgcttcagaaggccctaagtaatggtaagggatccccagtttatatgcctatgtttctcacccaggtgtatataacccttgagtcagtggcaacacaccagcaaatgagtgaagtcacatgacaattttactggaagattggttcagcacacgaggagaaggagttagtggttaggtttaaaaatacatcatagaatacaaatttcaaagtaaagtacactttcaggctcctggttacacttcttttgccattgaaaatactccagcataagagtttgagaagcactgccatgaacaacccaagtattgttcatagattgaacacctgatacatggtacataatgtgaatacagatatacattcatatatattactgtttttcaagggaacatggatgctgctgtgattaatgaaacacacttacatatatcagaagaggaaggctcagtggaggctcagctactgtctcagccaaagtccttgccctgcatcccctcactccaccctcagcatcttgcctggggtctcctggttctgacctccagcttctctggcacctgagttcccctctagctgggtgcgaattagcccttttctacctgtcagctcctgttgcccagcatctacctgatggccacacttcctgctcctgcaactcagaatcaaagatttcagcggcacctgtcccttaacactcctctcagcctagctctggtgtcagaatgcttctgtttttagtgtctgctgcctttcttatttttttccccagaaactgaaaagctgaatcagtactcaattttcccaactttaacaaggatttactttgaaaagttgtccagcatttttagactacttcctttgatagaagctcagacttatcaaaacatgtataccctgtatgactgctttcctctcacaattgggcccatagaacatacagacagaagggaggcagagaagagtacattaatttcctgggactgccataacaaagtaccacaaacagcccaggcagggtggctcatgcctgtaatcccaggaatttgggaggccaaggtgggtggatcacctgaggtcaggagttcgagaccagcctgaccaacatggtgaaaccccatctctactaaaaatacaaaaatgatccggatgtggtggcaggcacctgtaatcccagctactcaggaggctgaggcaggagaatcgcttgaactcaggaggtgggggttgcagtgagccaagatcacaacattgcactccagcctgggcaacagagggagactccatctcaaagaaaaaaaaaaaaaagtaccacaaaccagctggcttgcttacacgacagaaatggattctcccatagttctagaggccagaagtctgagatcaaagagtcaacaggattagttcctgtggagggctgtgagaaggaatctgtaattatgaaaaaaaaaatgagaataaacagtaacggagcatcctttgtgcgcgcttccatgctaagctcaaaaacataatattgaaggaaaggactgaaatatatatgcatatatatatacacacatatatataatgtgtgtgtatattttatatatatatatatatatatatatacacatatcattattttgcttttctttatattattaccccaaataaacacttacctcttgggataaatattttgggacatttgtcctattatttaggataataatataaagaaaaacaaaacaatgattaacacaaaactcaggatagtagttacctggggtgaaggtgcaggcaggaaggggatgcaatggggaaagggggacatagtggcttcaaagcactggcaagataagtcattagctggatggatggagggtgcatgaatgtttattcttctttaaacaacgtaaatgctttatacacctatcagaagttgggattataggaaacagcctctgagatggagattattatataagagatttatctgggtgtgttcttggaatcaacaaccgtgggaggaaattgaaggaagcagaatccagtaggggaagaatttgatcggcaaagcagtctcagtggaggtcttggtcaaccacatagagagttttgaacctcggatggcccttcggagttttcctgatttggtggtgggagacagctctttatacaccatgttagtcagtcactgcatgcagcccacctgggagacgatcttgaactttggcaaagacgctctcatcagctgaggccatccacacagggtgctgacaactaaaggctttttgctggcaatgttcccagcagccgagacaaagtccttcattcctgaaaggaactgagcagcacctcacagtgtccaccacaacacgggtttatatatttatatatttttcacaataaaagttgttatttaaaaaaagaaaatggttaaggcaagaaggccaagctataaaagggtatcctttagggatggtacaaaatctcagacaaaacgaagtcaagagcatagctagaggaatactgatgtggaagaaagctgagcacagggttgggagtgtctgcccatggagttgtacacagattttctgctggtggaggtgaaaccagtgaatcagatgtgattcggtaatataacccagactatgactaacagacatcgtggagtcagcttcactggggtgagttagtttgacaactcccagaaaactaatgttgctaactggcctctgcttggtccccacccaactgtaaggagcataagtagatagagactttttgtttgtttgtttaagatgaagttttactcttgtctcccaggctggagcacaatggcgcgatcttggttcactgcaacctccatctcctgggttcaagcgattctcctggctcagcctcccgagtagttggaattacaggtgcgtgccaccatgcctggctaatttttttgtacttttagtagagacggagcttcaccatgttgtccagactggtctcaaattcctagcctcaggtgatccacctgccttggtctcccaaagtgctggaattacaggcatgagccacactgcacctggcctgtggatggagacttttatcctcaggctgagagatgtgtgtttctttgattatacaatggaagagggtccactcgggtgctgaaagataccttgagaattctagtgttaaaatatactcaaatcatcataggaggccacttcgacttctttcccattgccaaccatctcataggaataaaagctactgtgtattaattcttcgctatgaatcaggcactgtcctaagtgctttacctgtattatctcaatcattctttacaacagctaaatgacacagatactatcaatattttctattgtgttgataagaaacgggaggtacaattgcatgtgcttcaattgcttactcaatgtctccaagctagtaagtaataagaccagcactgtttgtaggctggctgccccagaagctatcttttgtctgaacacttaactgcctgccagagataggagagcatcaagcttggttttgacaagagctctgtgtgttgcacagttctctgggcatggatacagcttgacttactggtcaagtaggaagggctcagtgctgagatgcagacgtagtgtccaggcatggagggcatgcctgttgggagaatgctggtggggacagacagcaagggctctgaggtctggagacaatcttaacctggctccagctctgactccaaagcagcccccaggatctccactctaagcccccaagacagttccacatggaaattcactcctcatgagcacaaatatggggatcaactagaatcatgacctgaagttcttgtctggagatggattttgagagtgaggcgagcaataccactagacaaggaaggatgctctgaagatttcttaattccttggaaggcaacagaagctaagtgaaaaatcaagaggaaaaaatgtcttctctgaagcagaaaatgtcaacactaggatgggaacttttagggttattcccactgaagatgggttaacagccagaccctggaggcaaactggctaggtcaatgacctaactccaaaattgggtaatgagtgaccctagaaaagttactgaaactctctgtaccttcgttagcatggacacccacctcctagcactgccgccaagtatatacagcaacacctgtcaagtgtttagaacagggccttacctgttttaagtacctctgtgttattattattagcaatccctacttctttctaggtagaaggacatcattgttcaccttgacaattccatcccagcctttctttttttcctccaggaagtcagggtgtggttcggggatcaaaatcattcagagtagcagagtagtgagtcatcattctgtctagaaggaaggcaagtatctacactaataagcaagtatacctggaaacacatcaaactttatgatttaaaaaatagaagaagtcggacttagtggtacacacctgctactcgggaggctgaggtgtgaggatcacttgagcccaggaattcaaagttaccatgagctatgatcgtgctattgcactccagcccgggcaacaaagcaagactttgactctaaaaagtcaaaataaataaataaataaataaagtaataaagtaataaaaattaaaaatagaagacacaatcacactctctggccctctgattccttatgtataaagtgtggtaggggttgtggattccactgggggctcacaaattgggttctgcagagccctggtattccccaaaggtgtactggcctcccaggacgtatggagcagaagccatgcaggcaggaccccagcccccacttcagccagagcagttccacttgcatctgttttctacattgtaactgtaagaataaaatatctgtagatggaaatggagcaggcccctgacgaaaaatgtaatcaagctcttcctggagaagagtctcaaagctcctctttttgtaattaagaatgcagccattaaaatattacacccttttcttttattcatgacaaatccgaatgagcacaatttggaaagcagcagggaggggaatgaacaaattgaattaatttctatgctgaatattaatatcgtgccacagaaagggagatgctttgcaaatttaaggcagttaagaaaacatttttatgcttcttagtaatttagacagcactgcttctgaaaagtgcttttctcctggcagttgtgtatgtttggtccagcaggcagactcactatagttgacttctctgttaggcacggtgcctagggcccatgacacttttaggggcccacaaaaatgttgtaactttcatttctattaaaatccaaatacatgtatatatatatacaattacatataataatgaattcagcctggattacactcctctttgggccagtgtagtcataaaatacaatttttaatatttttacgaggacagggtttatgaaagcaaagtgcccacagccccccaaagtcataaatctgtcctgatgactgcaactcactgcagtgaaagggtcacaacggggacctgctgtgcagaccccaagcccagcttagactccaccttaagtgtcaagtccatgcaatgtgttgtggacttagctgtgtccacagcctcccgtttttcctaatgatcccttgcctatgaatgtgatccctttctattcaaactgtggtggcacatcaacaggatgggcatcacctggggacttggtagaaatgcatcatctctagccccacctaagacctactgaatcaaaatctgcattataccacattctcttcccctatctagccccagattgaggagatcacatcccaaccagggcctgcgcacagggcttcaaggaaatgaccagcagcaaagtgaccgaggtgcacagcgaagccagaatcaatgcagaagattgggagacatctactttcagcttccaagtaaccaccttactgggggtgaaagacagaaacatctgctttctccctatgtcctagataaaggggagacgggtgctagttcataggttacattaagttttcttcttaaagaggtgtttgcattgttttgaaatgtttgaaaactctctaaattgaatgaattcataagttccttcctgctataagtggcctatttcagccctaatcctcctggccttgggaagtttagcagcaccaatcacttcttctctccagcttctaaccggttggagaaacgtgcacaaggagcctgaagatgataaaaggacagtgccagctttactaccagtaaagctgaatggggaagaaaataaattcccacccccttggaaaggcctggttgccctatagccatatcaataagtggcactcagaaccagtttggaacctggtcaagccagcaacaacaatttgctttggtgaagagcttttacaagttgtttacaatcagcattagctgcttacttctgaaagccagccaatcacagactcacctcaataaatacactatagtgacaaccaattaccaatagcctcatctgtgtacccacacctctgcggatgatgttgaagctcttaagcctctgcaacttcgccagtcactgaacttcacacttccgtgagactctatataaattagcggtctgctccaagagactgtacttcctttgctatgcttaacaatccattcgattttgtcttttttatttttagtatgggatgatagtctcatcatactttgataccctgaacctcagaatctgcatgaatataacctctccaaccaaatccaggtagagaagtttaattggctaactaaacttcatattttaactacatagaagaggccaagagggccctggcatcctcttagtgatatgaacagctggtaggggaagagagagaataagaggaatcctggttttcactgtccaaggagtgggaagtccactggactctctctctccatcttaccagcatgttagttacttctcaggggagggaggatgaggaagaggaaagatgaggggatggagagaggaggtggaaataatatttcaaaatggtttactatggtgtgaatgtttgcatttccccaaaattcatatgttaaaatcctaaccccaaaggtatgatatttaagaggtggggcctgtgggaggaaagtacattatgagggtggagccttcgtgattgggattaatgtccttatagaagagaccccagaaagctatatagccccttccacagcgtgaagacacagcaagaagacatcatctatgaagcagaaagcccttgccaaaacccaaatctgcaagtgtcttgatcctggacttcttagcctctagttgtgtgagaaacaaacttctgttgtttataagctacccagttcatggtactttgttatagcagtccatatggacaaagataatattccttccagagattggagccaaatctcctcatagaaacaggagaaagagacaataagggcttcccgtaaacattctttatcctaacagttttgcaaattgattggggagagaaggtgtaaatacttaaagcaattgatatggtttggctctgtctccccacccaaatctcatctcaaactgtaattcccacgtgttgaaggtggggcctggtgggaagtgattagatcatgggggtggtttctaattgtttagtaccatcgccctagtgatggctcatgagtgagttctcacgagatctgatggtttaaaagtgtgtggcacctcccactttgcactctctctcctgtgccatgtaaggcatgtattgcttcccctttgacttccgccatgattgtaagtttcctgaggcctccccagccaggtggaactgtgagtcaattagacctcttttctttataagttacccagtctcaggtagttctgtatagtagtgtgaaaatggactaataacagcaattaagaaacacttatagggcaaaatattctgagaataagactattggtaataatgtgaaggattcttagaaaacatggaatttgagatgatcttggagagatgaattaaattcatcaaaaatcacccggtgattatgaagcaccacggtgtccagcattgagtcctgagctgtataaacaagcagtcacaatttctaccctcaagaagctcacagtctgagtcttctggttctcaaatctagttatactttaggatcacctgagaagctttttttaaaaatgcccataatcctgatttaattggtctgagtgagtcctggccatcagtatcttttaaagcctcaggtgtaggaaaagagttcttgaagagacaaaacaaaagataatcataaaagaaaaaaatgtttaacttaattaaaataagactattaaaagacatcaccaggaaagtgaaaagacaagccacagactgattgaagagattgacaatgcatatatccaacaactggaaacaacacaaatgtccctcaataggagaatggataaataaattgtagtgcattgatacaaggggatactagacaacaataaaaattatgaactactgacacatggaacaaggtagatgaatctcataggcactttattgagagaaagaagacaaaagagtacatactgagtaattcaattgttaaaattttaagaacataggtaaaactaatttacggcagtcgacagtcatcttttagtgacttaactgggaagggacacagcagaatgttatgaaaaaactgtggatgtttgttttttgaatctcaacctggggggcatgatacagaaggtatatacaaggataatccttagagaagatggctggagccatcagcaaccgacacacccagccactgggggaaatgagcatcttagtcctgggagggatatctgggcagagtctcagcatccactacaccctacactgcgtgatctaatgtggaacttggggctgagacgtactggtctaaatcagtgattctcaaagggcagtccctgacaagcagcatcagcaccatctgagaacttgttagaaatgcaaattattgaccctctaatgaattggaaactctgggttgagcctagcaatcggctttcgcaagccctccaggtgatttcaatacgaactaatatttgagaacaactggtccaaaggggtttcacttgagatcgagaggggattttatttttcttttctttttttttttttttttttgagaaatggaaggaatcctggcaatgtcacaaagcatgtcaaatataacatggacagagaatgcagtttggagaaaagtgaacgagaaaactgtttagcaaatgggactaattactagatcttatttaaaatttttttctcttaatccaatagaccatatggaaatcatgtagattcttaaacagcctggcagaggagcaaggtaaaacacagggaagagaatctctatacagtgaaaattctaataggagacatttgaaatcatctttgtgaaaagtaaggaggataaaaagtatgagtgttaacagtaaaaatgggaaggaaaaaatgactctgagagactccacaatgatttgcatcagaatttgaatctccagtggggtgaggaagcaaaggttactataaagtatttttgtttttacattaaaaatagaggcagggttttgctatgttgcccaggatggtctcaaattcctaggctcaagtgatcctcccacttctgcgtcccaaagtgctgggattactggcatgagctaccatgcctggccactacaaagttttgagattttcatcactaggacaataggagtcaccaacacaaatggggaagtcaggaagagaatccatactgaaaggaacatgaattttgtcttctgttttggaaagtaagcctatcacatccaggtggagctgttttataaacagctagaaatgtaggacaggcagagtgcagtggtttatgcctgtaatcccaacaccttgggaggctgaggcaggaggatggtttgagcccaggagttcaagaccaggcagggcagcatatgaaaaaatgtcttacatgttgacagaaatgtgtttggtagaagtcaagcaaaatgaggcataagaaagcatcattgaatgatgataaaaatgaggtccgaagtgatcttattgcatgttttggtccatgtaaactgaatcctacccatttctccaacatgtaacactcctataactagtcacctttccacttatacagtaagctattcaggaaagtgacttggatctgttagagtggaatccagaatgtgacccatttcttccctttgcatttctttccctctttctgcctcctatccccatcatttgtctggctcatttcatccatcaggcctcagctcaactggcactcctcaaaaagactttctgtggctactctcagggtcccctctagttacctgtttatttctcctacagtacttttagagcaaacccttcttaaaaataaactctaaaatataactgagggctctttttttcagatgcttgactagcaattcatgttactcatcatcttgcttccaatgttccaccacatctgttcctgcctcttggatttgggtacagacacctttcccagggcttggaagtggctttctaagatttacattgatcaacctagggttaaaaccctttcaggctgctggcacttctgcttgcgctagtgtgagggcttatctcaccactgaaatgctggttctcctgcagttgcacttggtgggtccagtttcccttttctgtaagccacagagggtggggaaaagagctctgccttttcctgtttctattcactcttctttcccctctactccgtcagtgtgccacaccccaggctcctagccttctccaacccagccaaaggaagcctcagaagaccgttctcatctcccagtaggctctggacactcacaaatacaattctgaattagcagtcaaaaatacgcatataagttttgtttacatagaatctcagctctctcaaaatcccctgtttacctcacaactggattttacatgtatcaacaagcacagcaaaatgcaagataatttttatgaaatgtaaacctctctgtgacttctaaggggagaaacgtagtcttttgttcccatctcagatccgccagagttgcctacttagtttgaatacaaatttgagttacaataaattatcctgagccattccaggctaaccactatttcggtttccagatcagtccccattaaacatcaaaattgcaagacacgtcacctcagtggagccactgccttgatttgcaatgtttgatctggcaccaatacaggtttcttgacttcttaatatactctttcttattttttcactaaaattaacaaaaatgaatttagtattttgcttaagtaggaaattgaaacattccaagcgttacgcatcttaaattatgtaagtatgcaagtattttttttctgctttctttcatacgcattaccacctctgcaggagaagtaaaagtgaaacccagccaggcgaggtggctcactcctgtaatcccagcactttgggaggctgaggtgggcacatcatgaggtcaggagatcgagaccatcctggctaacactttgaaacccggctctaataaaattacaaaaaaattaaccgggcatggtggcgggcgcctgtagtcccagctactcgcgaggctgtggcaggagaatggcgagaacccaggaggcggagcttgcagtgagccgagatcgtgccaccgcactccagcctgggtgacagagacagactccatctttaaaaaaaaaaaaaaaaaagtgaaacccaagaatcctctagctgtaggaaaggaatggctagagccaagagaaaattaaacttgactaaaatgtgtcatataatttcttatatttcattgggctatcatccttccctcccatgagcactggatttatttaggaggcttatcatcttacaagttactttaatacaattgttccagaaaacagaagaattattagacttgtattttgaaaaataagcctcaaactcagcaataagaacccaaataccgcaacaattaaaaaacgagccaaaggccagatgcagtagctcatgcctgtgatcccagcctttaagagggaggactgcttgagacctggagtttgaggtcagcctgggaaacatagcgagaccccatctctacaaaaaataaaaaattagtctaatgtggtagcacatgcctgtagtcctagctactcaggaggcttaggcaggaggatcatttgagcccaggagtttaaggctccagtgaactatgattgtgccacttgcactctagcctgggcgacagagtgagacctcacctcttaaaaaataaagaaccaaagaccttaaaagacacatcaccaaagaagacatacagatgacaaataagcatatgaaaaggtgctccatatcatatgagaaatgcaagttaaaacaacgagaatccagaacactgacaacatcaaatactggtgaggatgtagagctacaggaactcttactcattgctggtaggaatgcgaattggtacagccactttggaagacagtttgccagtttcttataaaattaaacatattgttaccatgtgatccagtaaccacactccttgatatttactcaaagaagctgaaaacatgcctacacaaaaatctgcacacagatgcttatagcagctttactcataattgccaaaacttggaggcaaccaagatacccccagtaggtgaatggataaataaactgtggtacatccagacaatggaatatgattcagtgctaagagaatgagatatcaagccatgaaaagacatagaggaaacttacataaatattactaagtaaaataaggcagtttgaaaaggctacacactgtataatttcaactatatgccattctagtgaaggtaaaacttaaagacagaaaaaaaaaaataatcagtgcttgccagagataagtgggaggaagggatagataggtagggcacagaggatttttagggttcctgttgctctactctgtatgatactatagtgatagacatatatcattatacatttgtccatttgtataatgggtgaaccatcatgtaaactgtggattctagtgataatgatgtgtacatgtaggttcatcatttgtgacaaatgtaccactctagtggggatgttgataatggaagagtctatgtatgtgtgggggcggaagatatatggaaaatatatcatctattcaatttttctatgaacctaaaactactctaaaatataaagtctatttttaaaaatatgcttctgtgttttaaaaacaaggactgtagaattattaatgttttccaagatgaaaatcactgtaatcacttatcaatgaaaggaaaatgttacatattatcaattggattctaataaacagaatataatttatttgaagaagcacagaattgatttatctccagagatgagtttagctttcaaatcatcagagatacagattaccaacaattaaatactatgctatagcatggtagtttccaggcttctaaagtataaaaacatattttcaatatcaaaaatattttcagaatgtcacttcataagtaccatgtattaatcatttaataagaaaaatgacacctaagagtagactatgaggccatatggaatgagatctttgcccagcagagatgacaggtactaactctaccaatcagattctccttattgcaagtttgaaatggagacacacaaagtcatgaaccagcagggagcctgagggagcaaaacccttgagtaaccaagaagcctctcgaatgaacaggagaccagttgagtggtacttacctccctccaaccacatttcatctggttcatcttttttatttatttttgcttttccagacaaataagaaggggctgggcagagggaagtagaagtaagttaattaatttatagccttggaaggggcagcagcagggccaggaaggagttgagtcacgttaatggctcagcagagtagggactgccggggtgaacagataacctaaagctgccttgagcctgtctggaatgatcttgccagtccagaaggagtctgttctccaggaagctcaggcacaattaggttcttattttcctgctcagagatggaggagttcctgttcttgatacctcatcacctgactgagaccccccatcttccttaattcccccatttccttgtaataaatacttcagaattgaggtaacttgagtttatcattgttctttataactaaaaattatagctagcacagaaattaaatttattttgtcataatgaatatttgtcaaccatgaagacaaacaaaaatatacttagcattgtacattatttttcttgctcctcctactttttatctttttaaaaggaaagcagaaggcagtcttttaggtgataagcaattgtaaaataaagaaaacctaccttctgttttaatcactggtacagtaaatgtattctttctcaatgggatatagttacctataaatgaggctcttttaggagtttagaatactttcccttaaagtttcaaatgtttgtagtgtaaataaccaatttcactgatgtttagaagggaaggtagaggccgggcgcggtggctcacacctgtaatcccagcactttgggaggccgaggcaggcagatcacgaggtcaggagatcgagaccatcctggctaacatggtgaaaccttgtctctactaaaaatacaaaaaattagccagacgtggtggcgggcacctgtagtcccagctacttgggaggctgaggtaggagtatggtgtgaacctgggaggtggaggttgcagtgagccaaggtcgtgccactgtactccagcctgggcgataaagcgagactctgtctcaaaaaaaaaaaaaaaaaagggaaggtagagaggaatgttatgattcacattcacaagcatcatgaatggttctcttcaaaagttcatttggataaaaatttggcctaatttggaagtactggttccagttactgattacagagcctatttttatataacatgtttcaaatttgttacttttgctaataagtgtgtgataatcatgtctgtgtgtgtgaattgtttcaaggtttatcattctattaaagttagggttatgcaatgtggcagaattataatattgatagtgtaatgtgatttaatctagaattcaatgactatcttgttgagggtgcctactagaattagaatttttttatacaagacaaatgaatgttcactttcatgttcaacaattgagtaaatgatctgtaattttaggatatctaatccatcaaggacattgcagcatggttatcttaaatatttatcactgaagagaatccaattaatcatcccaaatcatatttccacttatataggcctccaacatttctaccttccatttttattcttcagactatccaggtgtactgggtttaagaatcaaagtgtttaaagggtatatcttcacattctgatattactgttttactatatcacttttttggagcgtttgtttgcttatcgttgctgtacccccaacaaaaacctggatgcctaataaagaaccaggcaaatcattgcaaaacattgggttgttttttattttgtttgtattctaaggttagttttttgctttcatttgcaaaactcaaataatgaaaatattttattgctacctaaaaagcatcaaatagttcaacttgactttatatcatccagtgatcaaggggcttacaaagaaacaaaagaagtccagtgatagagctgagaaaacgagggaatgtagtaaaggatgagctggtgacaccaaaacctgcaaggcagaggtgaatgatttgagtacctaaatgcctggggaggtaatgtgtaaaatgaccatgtattcaacaagatggagctgcaaaaccaacggtcaaatggagagtacaatccttgcctatagacactcaaattcaatttgactttgaaacaaagaacactgtgctgcaaaaatatatgtctattatgtctatttcaccataaatttgtgcccccatatggttttggaactcatgcttaggaatttgatctttatctaaaagcattagaaaagaagctgctgaaatagaagtagggtggaaagagtgacactatcagatttgtattttgaaaaacagtattttagaaaaaaaacacaaaaccccaaaaacttctcagtaatattcttactgtgatagatagtatatccatgcatccatgaaaccaaaacaggatgttctttccagctgcagtatagtaactgaataggaggtcataggtagagttggtgaacagaacacgtgtctgatttttttccctcactaaaccctctagaaataatttttttggccaggtgcggtggctcacgcctgtaatcccagcactttgaggccaaagtgggcagatcacctgaggtcaggagttcgagaccagcctggccaacatggcaaaacaccatctcaactaaaaatacaaagcttagcaggcatgatggcacacacctataatcccagttactcgggaggctgaggcaggagaatcacttgaacccgggaggcggaggttgctgtgagctgagattgcgccactgcactccagcctgggagactccatctcaaaaaaaaaattttttttaagttaacaagcacacaaaaaacgtggaaaaaagggaaagagacaagagcactcgaaatgttgaggccagaaagcagatggagggttgtagccaacttggagacctcaaaaagccaaatcctaatctggtgatggtgaaagccaagaaccagcctgatttgtaaccacagaatccccaaaggtccatgacatgatagcaccaagcacctctggaaatggtggtgaagtggggccccaaatcaggaggtccagatgaaggctgtttgagaagccagtagcttcccaggtctcccccatctcctctgtgctgctgagcaacttgtcccttctgcacctgggctggagtgtggaagcaacttgtcccttcccacctgggctgaggtgaagtgtattctttggagagggcaaaataaatggattctggactggtggataccgaacatagttgaggattaaaatcttataccaaaaacaggacttaagggaacatgtggatactggatgctgagacagctttccctctttctctacttggcttctaaaatattcctagccaggactttcagatcaggagagtcttctatgctatacaatttctgaccaaagcaaggtgagaatcataaaatggcccattcataccatcttaaggtaaaattcaactatttaatcaagcactcataagcatgagtcaataacaaataacaggaaaaactcagtagtagggttagtcaggaccattactcaaaaagtaggaccaaaaaaaatacattaaacataagaatgaaaaacatttttttaaattagagcaccaatccaggagaaagaatattcaaacaactggagttgcagggtagaaaaaaaaaaacggggaaagaggaagaatgcaagttatcaatgaaataattgaagaaataatttaagaaattttttcaaaacagaaaaacatgattttccagaatggaaggacccataggtctctgatattgtgatgtgtggcaataagaaatgtatattctgtcttcaccccctagttcctggcacagagcttctaaaacccttggaatttcctcagtgataggggtgaaagattttttttcataatttcatttgtaataagttcctttcaaccacacctgagtttatgttaagtcggtacctctgggaggatggggctggtggtcaaaggaaccaacaaccacgtggctagagggtcagaactttcagccccacttccagggagggaaaaggggctggagattgagtcaatcagcaatggccaacgaacacatggaggtgctggaagggtgatatgcccagagagggcatgaaagccctacacccctttgcacatatcttccctatacgtctctcccatttggcttttcccgacaggaacttaccaaaaaaattctggagacaatgaagcagccttcaaaattctgaacgaaagttaattccaatctaggattctatgcccatccaaactatcagcgaaaaataagggtcaaataaagacgttttcagatacgtacagttacaaaaattgacctcctggatattttttctcaggaaacttttgggcaacatattctataaacatgagtagaccaagagcgtagaagtcactggatgctgaaaataaataggaaatctcaagcggatttaacacaggatactaaaggaatttccaagagaacgagagagggagacaccagatgacacctatgcacctagcaaagaagggaacacatccagaaaaaatacttgtccaggtgtgtggctcacacctgtattcccagcactttgtgagtctgaagtgggaggatggtttgaggttaggagttcaagaccaggctgggcaacacagtgagaccccatctctataaaaaattttaaaaaattagccagacatggtggtgcacacctgtagtcctaggtatttgggcgtctgagcagggaggatcacttgagcccaggagttcaaggacgtaatgagctataatcacgccactgtactctagcctgggcaacagagcaagaccatgtatccaaaggaaaaaatatgaattggagggaggctaaagcagaggccgcttcctaaaattgttccccttttataataggtctatgattctgttctactttcaagctagtaagttagcttgctttagtttcatggatgctagcagaaaacataagaccccagattcaaagacaaaggattttattactcgtggcacatcaagcatcaagagcatcagcattatttgcattagtttctctcattcccgtgcctcatggggcaacacagatggctccagatggaagcctgcacacacaataaggtggattacagaagagaatccttgagcttagggagccccggtttcttatatgggcagtaagcatccttgtgctttgctctcaagggtgatgctatcttccaatgctgtttgctatgcaaacttcctttaaaaaggtagtccagagcaaagggtgatcagtcttcttgaaagttgtgcaggaatgtgaaagacctattgagaattctctccccaacctacgtactcaaatgaccttgtacatttctttcaccgtacttatcacaattgcaattgcatagttatttgagtgattgtttactatttgtttctcctctaaatcataagctctatgaaggtagggaccatgtctgttttgttcattgctacatctccaatgactggcagagtgcagatatatagtagaagcacaataaatgttttttggagaactactcatggatcaccaaacttgagtacactagatatacaaacgaaagatgagtaacaggctacagatgtcacgaggcataatgtactttaatggtattccttttttttttttttttttttttttttttgagacagagtctcgctctgtcgcccaggctggagtgcagtggagcgatctctgctcactgcaagctccgcctcccggattcactccattctcctgtctcagcctctccgagtagctggaactacaggcgcccgcaaccactccttgatatttctttacatttatctggcacttattttacaaagcacctttcatgcattatttcatggaagcttcacaataaaactctgaattagatgaagaggttaagagacttgtccaagatcactggactttttacgtatgaaacaaacaaacaaacaaacaaacaaaaaacaggcctgaaatctgggcattttaagccaatactttgtcctctatttttttagtgatagtgtctctgtcacccaggctggagtgcagtggcacaatcatagctcactgtaatgtcaaactcctggctcaagcaattctttcaaataactaggactacaagcacatgccaccatgtgtggctaattatttttaatttttttagagacaaagtctcactgtgttgcccaggctggtctcaaattcctgtcctcaagcaatcctccaacctcagtctcccaaagcactgggataaagacacaagtctctgtacttggcctttgttcttctatttcataagacattattacctatgacaattacgaagtagaataatgtcaaaagcaaaactaggggaaatattttcaatgcttactttaaatgaaagtttaaacacctgtgaaaatatttcatttatttattacagttatcacagtgaagatgaaagagtagaattcagttttcatcattctatgaattaaaaatagcaatgctttttgtatttataaagcataaaatatacatcactttattctcgcaaaatgcaatgagctaggtattacacgtctttcacttaacagatgatgaaattgaggctcagaatgctttagctagtagacagaaatcacacagctaattctcccatgagttaaaatatagatatgttaggctgaaaatatgatgccttctcataaaaggaaattactttcccaagaggcagatgttcctttcttcaatatctctcaaaacccaaacataatagaatacactcagtgtattctaatatgttctactattcattaatctcttactttgtcttactatgataaatattgtgaaattaagaaaccgttttctaaaataagccactcatctaagaagtgattgaaagccgttacatgtacacttatctttagaattagattttctctggaagtattaagaatttgattaaaaataaatattactagtttaacattgtaatgtgcctccaactcatacttcagtcatcagatagtcactgtagcaaattaagaaatacctaatacaagtataattttaaagtttccatttcttccttctattccttgtttcaatatgtttcacttctaatttcatatatataaatgaaacatttctcatttgtgccatttattttgcacttataaattgctttgtagggttatctttttacacattgatttctagcctttcacaaccagaatgtaagctactttaggacatggatcatgtcctatagtttaagactttctctcctgtctgggcccagtagatcattgtaatcccagcaatttgggaggccaaggtgggaggatcacttgaggctggaagttcaaggccagcttgggccacatagtgaggcctcatctctacaaaaatttaaaaaattagctggacatgatggtaccttcctgtagtactagctactaaggagactgaggtgagaggatcacttgagcctaggaacccagaagtttgaggttgcagtgagctatgattatgccactacactacagtctgggtgacagagcaaggccctgtctctagaaaccacaatcacaacaacaaaaacaacttcctccactccacctctctgctttgcaccttgtcaagctcaattcaggtgagttcctggctttgctctctttattcctctccccgtttaaagtcacctgaaaaattagccatactctgttcccagggttaacctaactaaagcaagagtagattaccacccttcaaaatcagcattttggagcttatcctcaaagacaggccagccctgatgacctggcaccaaggttaacaactggcctcccacctccagtctggagcccaacgtggcctcacgtgtatgacatgccttctgttccattgctgttcccatattgctaatctgggaatttttcatgatgttttagtcattcccaggaaagagagaaaaggcaaacaaagttgagacttgctttctcccccaggaagatctggaatgtaaattacacctcagagttttcctgacctgaagcaagggagctgggtctttttactccatcatctggcagtcattggttaagagctgcgccaggggacctaaaatcccagctctgtgcttactggcaaagcagccccagacgcacaagagcagtcctccgaagaataaatacaggtactgtgaagcagagggaaaaaagcactgaagcacagaaatagtgaaagtgatcccagcagatctggtcaaagcacttacggtgtctgctgcagctctatccatcagaagaagaccacaaaaacctgggcccccacaacacagcctgggacaactgctggggatggccagagcctacctgcaatagaagcagctaatcccacaaggagaagatgaggtgatatgagcacagagccctgtgtcccaggagaggagcatcaggacagattttagagctgtaacaacgggagaggtctgatgaaagaaagctcagagatgataaaggccaatgtcaaaggacagaaaaggacagcagtgtgagcaattttgaatgcaaatgaatcactgtggcatccccaaacagccaaaaggaaggcatttgtgtgggtgctcctgcaattccttgggcttgacctgagttagagaaatataattgtattggaggttggtgtggcttggggaaagataaaccacaaacttcattttctgctacactgctatctgctattactgagtccaaataaaagttaaaagtactgtcagacattaaaggtaaaaaaagtaaagatactggatctgtcttttcactccctaccagcaaatctatgcattgtgttgcttcatctttccaggtcaagagtctgacttatcttttcatttatgccccacaatttacactgccatatagggagatttttaaaaagacagtaattagtctaaagatctctatccatgttgtttacaaaaatatgcaaaaaaattcctttctttctttctttctttctttctttctttctttctttctttctttctttccttctttcttccttcctttctctctctctctttctttctttctttttttgagacagagttttgccctcgttgcccaggctggagtgcaatggcacgatctcggctcatagcaacctctgcctcccgggttcaggcaattctcctgcctcagcctcctgagtagctgggattacgggcatgtgccaccacacccagatgattttgtacttttaatagaggcgggttttctccatgttggtcaggctggtctcgaactcccgacctcaggtgatccgaccgcctcagtatcccaaagtgctgggattacaagcgtgagctaccatgcccagcctcataaatatttttaaagttaggtaccacattaggcagataaaaaggagtgttcctgtgttgaaaaagaagcaacatacgtggaaatgataaacatgagattcaggttggtggttacctgaaggaagaagaaaagggaatgggaactggaagaattaaaccatgcttttttgtatgcctgaaatgttgtgtaacaataattcaaataagtaaatgaaaatagaggccaggcatgggggttcctgcctgtaatcccagcactttgggaggctgaggcaggaaagatcacttgagttcaggaattcaagactagcctaggcaacatagcaaaaccccctgtctacgaaaaattttaaaaacttgccaggtgtggtgttgcacgcctgtagtcccaactagtcaggtggctgaggtgggaggatcacttgagcccaggagatggaggctacagtgagctatgatcacgctgctgcactccagcttgggtgacagagcaagtcttgtctccaaaaaaaaaaaaaaaaaaaagcagaagaaaatacaagctttagtatttccttgcttcaccctaaaggatcattttgaatactccctgtcccctgtactttgtttgggacatggtatgaagatactaaaggcttgaacttatagtgacaggagaattaaagagtaagaaatcaactagggagatatttaagtggtgactgaatatggagtagtaaagacttggagatattggtatgattttgaggtttttgggaaaaaattgttcactttcccattctggagtccccagtccacattttagaacaatctctaaatcccgtatgtgttgctaaatcaacttttcagctctcatttagggatgcgaaataaaagtgtcgtttaatcaatatgcattccaacaaagcttttttaagcatttatttgccagacattgtatgtgccagacatgtccttaaagaccaaattggtattataatatgatgataatagctaatatttattgagacttttactaaggcctgcactgtgtgctaagcactttgcctgcattgtcttgttaaatcctcacagcagccctacaaaggtggtactattgttatccctaatgtatagatgaagaaatgcaagcctgcagagtaagttccttaaggttaactagagctagaacgaagatcagaatccaggatttagtgatgataaaatctgtatacctcatcactggtatatacaacaaaaatcaatggaaaagtttctatggtaatctagaagaaattattagcttagctagaggattcaatgagagtttcaaagaaaaccgataacagaattttaaaggataggtagcaaacaacattccagaaagctttgacagaagcctgagagcatatgatatatatgcagctttgtgtgtttcaatgacatatgcattcaggggcagtggcagaggtgggtctggtgaggttggtaggaaggaaattaggaaggatagcacgttcgggacggaggaggggttgaaaaagaagtgttggctgggcgtggtggctcacgcctgtaatcccagcactttgggaggctgaggctggtgaatcatgaggtcaggagatcgagaccatcctggccaacatggtgaaaccccgtctctactaaaaatacaaaaattagccgggtgtggtggcacacacctataatcccagctactcaggaggctgaggcagaagaatcacttgaacctgggaggcagagattgtagtgagcagagatggcagcccggcactccagcctggcaagagagcaaggcaagactccatctcaaaaacaaaaaaaaagaaaaaaagaaaaagaaaaagaagaagaaggtcttcaataattcctgagtaactctagaatgatctacgtcaggcttctccaggggcactacttgtgtgtaccttttcaaaactagctgaggaaatggaccgcaggtatacactcaactataaataacttaagcaattatttgtttagaaagataattacttttaaaatatatgagtttttacacttttccacagccataaaggactttacttgagaccagttgtgttaattgaccatgacattaacaaacaaccaaatgttagttgtctaacactgatagtttttctcagaagcgaggtaagtcaaattttaagctgcagatgttagttttctggtgcagagatggtactatagaagtctatatctggtacaatcacttaatgatcacacagtaatactattattcatcttattttacattatttggtatggatatgtacataaaagaacatgagtctgaccatcaggatacttggatcctaaaataatattagctagatgtgcaatttttattatgtcatttatttatctaaggctcaactcatctgtaaagagagaggtttgtagtagatgcaccctaagattgtttttctgtgaaattgggtaaccactggtcttgacaagtttaaaacgtagttgaataattcgagtatatccataggaaaatcgatgtaaaagtatacaagtaacttaaaaacaaacactataaaaggaagaaaaattctggtgatgttaattggaaagaccaagatcagaccatgaataagcagaagaaaggtaagtttggccaggcgtggtggctcacacctgtaatcccagcactttgggaggccaaggtgggtggaccacaaggtcaggagttcgagaccagcctggccaacatggtgaaactccatctctactaaaaatacaaaaattagctgggcatgatggcaggtgcctgtagtcccagctactcgggaggctgaggcaggagaatagcttgaacctgggaggcagaggttgcagtgagccgagatcatgacacagaactccagcctgggcaacagagcgagactgtgtctcaaaaaaaaaaacaaaaacaaaaaacagccaaaaacaaaaagaagagaagtaagtttggaaattaattaagaaaagggtagaaattcttagtaggtaaaatcatgtataggataaatattttgtttattttctcctcctcataaaacaactgattatccaagactaccagtacatttttccttgcagtcatataacaataatttcatattttacctatttgtgtgacagcttaaaatctttctagaatacataggctacgcaaattttagaattccttttaattgtaccaagagggtggtattggaagattactgaaaagattatcagaaattatacataattgtgggttgtgtcactatgggaaaccacatgtattgtatcactaaggttacaattataaacacactctgactcaaattattgcaaaacattaccatatttgggtgaggtttctagaggaagagagcagccaattaatcaagcaataatatttgctgagtatccactgtatacaaaatactaatataggtgttgctgagtaaacaggaaaaaagacaggaaaaaaaacaaaaccagaagtactgctgatgcagcacagggtggtgaattgaatttacaggatgggatagtaattgccttcattaagttttatttggtggacagtgcccagacttaagaggaagaaagaaaaatcttgcagtggaaagaacatgaaatataaaataagatgcctaggttccaatcccagctcggtcacttaggagctatgcaatctttttctttctttctttctttctttctttctttctttctttctttctttctttttttttttttttttagatggagttttgctcttgttgcccaggcaacctccgcctcctgggttcaagtgattctcttgcctcagcctcccaagtagctgggattacaggtgtgagccaccacgcccagctaatttttgtatttttagtagagacagggtttcctcatgttggccaggctggtctcaaactcctgacctcaggtgatctgcccacctctgcctcccaaagtgctgggatctatgcaatcttaaatcatttagcctcatttttttcttctgtaaaatgggtataatggtactgataagaacctcacttgaggttgcagtgagaaatcaatgaagcaatgatttgtaatctataagagtaaacatgttaattttcatccagtgttacccttggttaaactatgtggtttattctctttatcttcttcacaacgtttatcctcgaaaggacacctgcttttttctgcatgtgtcagcatgcttctccttcctcttctctccccaaatgaaccatcagtttttcaatatcatagcttctgtttgccgtccattcacaaaaaacaatgatttgcacattatgaacacccaataaattacttaataataaggtcttgcctctgaacatttatttgatactctcacatttcatttatgtgcagctgtcagattcatcttgctgcacatatttctgatcatgtcatgtcactgttcaaaagttctcaacagttcctcacggaatctgaacgcctatcttaaaccctaaggccttaccactcaaaatgtggtctccagatcaggagcactggcatcagctgggagcctgttattctacaggctgtattctggagaatacagattctccagtctcatgccacatctattgaattaacaacttcgttttcacaagattcccaattgattcatatctacgcagctttgattacatgtttaatctctcataaacttcaagcttcaaaagcagggttgctagatttagcaaataaaagtaaaggatgtccagtaaaatttgaaaacaatgagtaattttttggtttaagtatgtctccactgcttcatgggacatactttttaaaagattgcttatctgcaattcacatttgattaagtgtcctatatttaatatggcaaacctattcaggagggtaggatccatgtctaacatagctttgtattcccctggaatagtacagtgccttccccaactgtttttgtttttttttgttttgctttttgagacagagtcttgctctgtcacccaggctggagtacagtggcgcgacctcggctgactgcaacctccgtctcccgggttgcagggacagggacaacctccgcctctcgggttgcaatgacttctgcaactctcctgcctcagcctcccgagtagctggtattacaggtatgcgccaccacgccccggataatttttgtatttttagtagagacggggtttcttcatgttggccaatctggtcacgaactcctgacctcagatgatctgcccacggaggcctcccaaattgctgggattacaggcctgagctaccgcgcccggccccaactgttcaatatatgtttgtttaatgagtagaaaatgagcttcttgagtatggaagtttctctttttatttcaacagttttggaatacaggtggatttttggtaacatggataagtcctttagcggtaacttctgagattttagtgcacccatcacctgagcagtgtaccctgtacccaatacgtagtaatttatcccctccccagtccccaaagtccattttatcattcttatgcctttgaacccacatagcttagctcccacttataagtgagaacataaaatatttggtttcccattcctgagttacttcacttagaataatggcctccagctccttccaagttgctgcaaaaggcattatttcgttcctttttatggctgagtagtattccatggtgtatatacccacatttgctctatccactcattggttgatggacacttaggttggttccatctctttgcaattgcgaattgtgctgctatgaacatgtatgtctagcttgcttttttccccctcaacactgtatccccagagactaacacagtgccccgcaccccgttaaagaaccaaaaaatatttgttggatgaataaaggagtatatcaagagcaatctttcaattatggagagggtcgtgatgtgtattttaatgaaagccaactatcttctctaatatttgaaaaaacaatgtttaaaaggcttctatttgtacaccttttcacattttagctggcagagttcaggacttgatggaaacataacgaagggctcagaatgtactcatcgcagactgagcccatatggtcacagtggggagagcacgctgcactcaagatgctagcaagcctgcagcaggcggcccagcgagacacggtcccccgcccggccaccaggcgcccgcgcacgcgcacagccgcgctcagtccgcgagggccgggtcgagggaggcggggctcccggggtgcgcgtgcgcggcggcctgagcggcgggcccctcccttagcgggggcgcgcggcgctgaggaccgcacggaaacggggaagtcaggtggccgctgccgccgccgccgccgcggtttgtcgccagaaggaagatggcggatctggaggagcagttgtctgatgaagagaaggtaagagtcgcgggggcgacggcgcgggctgtcaggagccggctcagcccgggcgggtgggcccggagtctggtcgcgggggaagggcattggcccgcagctggccttgccctcggctgcccttcctcccccatccttactgcgcccagtgcctgcccctgtccgtcacccgaggccccgcgcgggggcaggtctctgccaggcctgctcgctccgctccttgtagggtgtgtactccgaaaataggaagcgggagccgggcgacggcgggcgggggcgcgggcgcgggggagggcggcggctgcccaggaccctctcctgctgtcgggccgcggggcctccgccggggccggggaccggggaccagggacgcaaaggggtttgcgtccgtgcgtgggagcggcccaagggcagtgcccagcgcggcggcctggcctgtgagtgtagcggcgggtgaggggaagggaaaaatcgcttaggaagcagaccttcacttctcccttctacttccccctcctcaaagcaaaatgcttccttttctgatcctctacggtttatccttttttttccctttccccatggaggcatctctccctccttctctctttcctttcgtggctctagcagtaagcttgcagctcccatgttccccaggaggcagcggagttgctcacaaaaagacgaccccctccccatagttgttttctgcccacgttggcagcagcccccccccgggggtcgatttggtggcacctcactttcctgctaggacttcttccgaagaggggaaaatgtgcaactccttttactgtatattagatgctgtgacagcaatggaaccagatgaacgacttaagttctcagatatttaaaacgagtaatggaataattcattgaactgctgctctcttaattcgcccctttcgtttggcttttgggaacgtcccattcccgagggtggtggggtaggggagaaccctgctaattttgactgtttctcggaaaggacccttagaagtaactgacagaacataggaatgagttagttgcagggttggaaatgtccactcttcgttaaagagtgcttcatttttaaatttcaaagccagtgcaggaaaatacaggtacatttaggtatgttgtggtgtttaagaaatcttcatgtaagtctgaggatattttcatttaggaccctctgctctagatgtttttatatgctgtgttcttgcaccgaaatagaaggttctgtcccattcccaatgtgaatggtcagaagtcagcctcatctttattttcggaaatctttttttctcttgtgttcttcggtgaaagtgataatacaacaacaaaatgggggcgagcaacgtctccatagcccacagacccagtaggcagatccccgtatccacaaaagttgctgtacagtattcaatgtataatcttgataaataatcctattttatttaggtgactgaaagtgtacaggagtgcacaaacatatttaaaattgaggcgtgctaaaaagcttaaaaagagattgtcgtgtttttattctaccattcttaagtgatgattagtagctcaagtggctagaaatctagctgaagagagactactcggtgtgggagttaatatagacctgccatgtgttgtaaaggcctaaaataaaaaagttttttaaaaatgagataacaagatgccttattatctggcactctcagggcactaagcttcataaagaggaatgaggaggttgtgtgtcttaaagcctgtgccgcctagtagcaaaatgttttatggttaaatgaatgaaaattctaatttgatttttgatgttttgtaagaatattatgtagatattttacatataaattttatcactatatttactaatttaaaaactgacaaaacctttaggttaaattcaagtaaccagtaaagtgaaattttaacgttcttgtcacttgagatatctaaaggttattttcattttgggggaggaggatgtgtccagtatgggatcagaaaacagagaggacttaaaagtgatattttaatattactcgttctactgccttattggtaattttcaaaaataagctcttaagctgggcacggtggtttgcacctgtaatgccaactactctggatgccaaggtgtggaggatcgcttgagcccaggagttgtagaccagcctggtaacatagcgagacctcatctctaaaaaaaaatattaagttttgaatacttttaagtttttgaaatttccattctagattgcaaatttaaggaagagaagctgttaagatgtgtctagtaccatactttatatatgcttggctcagttagatacattcattacttaatttgttgttgtaagaggtagttctattaccatttcacagatgagtagagtgaggttcaaaagctttaagtagttcacccaaggacggtcaagatgaaggtagtatttaaagtttgtcttagtccaacgttgatgttcttgtgacattatgcgctctcttcttttttttttttttttttttttttttgatacagagtcccactctgtcacgcaggctggagtgcagtggtgcaatcttggctcactgcaacctctgcctccggggctgaagcgattcttctgcctcagcctcccgagtagctgggataactggcacatgccaccatgcccagctaatttttgtatttttagtagagacggggtttcgctatgttgcccaggctggtcttgaactcctgacctcaggtgatccacccccctcggcctcccaaagtgctgggattacaggcgtgagccaccatgcccagcagacattatgctttcttaaacaaaattgataagaacctcttctggttttgtctcttcatttttaatttgttgacagcttattttgaaaaaggagaaacgttgattcttccttagacagggtctcactctgtccacccaggctggagtgcagtggtgatcatggctcactgcagcctcaacttcctgggctcaagcagtcctctcacctcagtctccccaagtagctgggagtacaggcaggtgtgccaggacacccagcaaatttaaaaaaattttttgtagagacaaggtctcacgatgttgtccagggtggtctcacactcctggctcaaacgatcctcccacttgggcatcctaaagtgctgggattacgggcatgagccatgattcctagcccttttttaaaaagtaataccaagcaaatagtgttaggttctaaatttttgtcttgatgattttagaataaagcttattattaacacatttaaaggtgttatgttactgataggaagcattttagaaatcaatctagaataatagttttgttttttaaaatcatacacaattgctttttgaggatactactatgaagtttaataaccttttctcctttggccactgggtgaatgggaaataaatttagctgaagaacacaatgaagttctttaaagctcttaacttgctatagtgtgtcccatagactttttttttttttttttgagacggagtctcgctctttcacccaggcggtatctcggctcactgcaagctccgcctcctgggttcacgccattctcctgcctcagcctcccgagtagctgggactacaggcgcctgccaccgcgcccggctaattttttgtatttttagtagagacggggtttcaccgtgttagccaggatggtctcaatctcctgacctcgtgatccacccgcctcggcctcccaaagtgctgggattacaggcgtgagccaccgtgcccggcctcccatagacttttttacatagttacagaaaccctaggccaaaaacagttcattttcattcctgggtcagctgtattgtacagtaaagcatttttgtgaatttgaaattgtatgaaattatggtgtaaggctcaattgaaaagacccattccgaaacctctctctggataagagattcaagttccagaaggaatacacttagttactgatgggaaagatcgtttttcttcctgtaaccctttacctcagtgattacaataatctgtcccatagcttcaacttttaggtctttgcagttgtctcccaggtacatagctgtagcactaacttctttcctgattactggtcagatttttatctgctattcatgttcactggagatggttaattaggtatgttcaaatggagcttgcctagaagtaaatttataaacgcccatcttctttcctctcacacaaaggggggtataatctactcttgataatttttctctttatatctttattcccattattccagtcatcctggtttttaatttcagatttattctaactttttttggccctgtaccttacaatcaactggtaaaagttgtcacttccatcgtcaaaatatgtattatacaaataacttatttcttgcttgaaaagttaattcatttatattaatacttcgtttattatctctgcattgacctgattgttaaataatgtttggtaacaaaatttcactgtacaaacagaatgcaacttgattatacttgttctgtgccaacagttaagaagtaaagtcaagaaaaatgtctcatatctgttctttcccttctgttatatttgccactgttaggcttttactagaaaatttctagactaatccctcctgtttcctgtatctaagccatgctttactttgtcatttctctactctcaaaattttagtgcctggatcctccattgcctttacaaggaagccaagttcttaaaatggtattcatggccttgtattccattttaacctaaatagttctgacattttcaatacgtattgttacttaatcgtgctgtgaatttagagagacttcagagagctgcatactagtccatttctctctctttttttttttttttttttgagacagattctcactctgtcacccaggctgcagtgcagtggcacgatctcggctcactgcaacctctgtctcccaggcccaagcaattctcctgtcttagcctcctgagtagctgggactacaggcacacacctgcgtccctagctaatttttgtgtttttagtggagacagggtttcgctatgttgcccaggctggtctggaactcctgagctcaggtgatctgccagctttggcctcctaaagtgctgggattacaggcgtgagcgaccactcccagccactggtccatttctagcacctcagataaattatttaatctctcagcctcagtttgctctgaaatgttagaatgttgtagtaagtaccttcttcattaagttgttgtaagtctaaatgggcttggcatgtagtaagcgcacaataaatggtagttatttttctctgctcatgacttttcatctactttgagtgttggtactgctcccaggtctgtccccttttttgaaacatgaaaatctcagtcatctctcaagatttagcttagattacacagctagtttagcctctcatctgaactcttcaagagatcgttagtattaaatacaattttgcgtaatagttatttgcttaccgttttttcccttttccattggaattcctaagtggagacataatgtcatctttagcatctgttgttactctaccatgtgatgaataggatggctgtacctgcagtttatatacttctccctcagtgactggcttcagaaattttgtgtgtgtaaaaacaatataagctgccattgtatttcataatattaatgtaaaattagaaatgtttttattggctgggcgcggtgactcacacctgtaaccccagcactttgggaggctgaggcaggtggatcacctgaggtccggagtttgagaccagcctggccaacatggtgaaaccctgtctgtactaaaagtacaaaaaattagctgggcgtggtgtcgtgcacctgtagtcccagctactcgggaggccgaggcaggagaatcgcttggacccgggaggtggatgttgcagtgagcggtgatcgcaccactgcattccagcctgggcaatagagcaagactccatctcaaaaagtttaaaaaaaaattcttattattgagaaggtaaactcaagcaaaaagctattaatgtggacaatattcattcctaattctattctatagataaattatgttatttcaccaataaagtgtaaaaacttctgttgcagacaggaacttgatagcagctgtagcattagtggagtttttcagactttgtacattaaagtaaatttgtagtaaattttcagtgcatttgggagccatttttgcatgagtagttgaatagatagaataattgcatgttagtgtgagaatacagatatgaaaacacttagagcagagaatctaaaataatttttaaggttgaaaagcaggatggcaaaacttggatctgtggttccaagctatgacctaaaagcctaatcagtcacctgaagcaaaaatttgttaaagttattatagcaataatttgttaaataggagattcatgcatatcaaagaaaatggggtctttgtcttctgaaaaccactctctgacaggttccatgaaaatacccatggctgtttcaaaaaagaatttcataaattttattttgaggattaagtatagtttttgcattcttgctcttatgacatatttacatgtttcactatgcatctaatgactgagaacttttcttatacattctaattcgcagtgtttctactggaaatgacttttgaaatccatttacctccatcttcattcatttactaaatataccacatttcactgatttcagtactgatacttttttatattttaagatctctgaaatcaggctgcattgtacaatcaatgggttgtaatatttcattggtagcgtttttccttgtttagtggtacataaagttatgcatcttatattgattgtgaatcaggataggcaaggatatagttcagtaacaaaactcctaaaatctcagcacaagggtgttgaatgtggaggctttgtactgcatctcattcattccatgtatgtctagcgtgagttagcagagagccctgctcagggaagtaatttagcgttccagttggttagagagcttccatctaaactttcttctcagtcactgcagtggtgggaaggaaatggaatgaattgcacacttgttttttttgttttgttttgtttttttgagacggagtgttactctgtcacctaggcttgagtgcagtggcacaatctcggctcactgcaacctctgcctcccgggttcaggcaattctcctgcctcagccttccgagtagctggaaggagctcacgtcacttctgctcagatttcaattagctaaagcaagttacatgtataaacctaatttcagaaaggtcagggcagaagaggagaattggaatatttgtgaatagcagtaatgacagcatagattaagttttaaattcactaaagtgtagcgatcacctggaaggtagatataatgcaaaactagattcgaagaggaattggacatatgtaatatacatactaaattgggtctaaaaatttagaagatagaaaagctacttctgcctaggggtatggtaaacatcagttggggtcaagctcataccagagagcacaacatagggaaaaataacaggaaagtgggaacaagcaggcagtgagttttgtgtaaaaagaattcagttaaatagttgagtgtctactctatatttggtacttttacaataagagatgcaaaggtgaattgtgctgtttaacagctgactgtcagggtttttccatctcatcaatgttgacagtttgggccagatattgttgggcaggtggacatgctgtgcgttgtagggtgtttagcaacatccttagcccacatgatatgccactaccataacccaggcttaccaatccagaatgtctcctggtggacagattcaccccttgttgagacccatgagtctagatagattagagctggtaagaacagttgagaacctggcttaagtggactttaggacctggtttaagttcgtcccacaagaaatggaggaaaaaaagatcgccaatagattttagagttggaatcaagaagacttgataaatgaatataggggaaaggcgtgagtcagagaaaactgtgaacattaaagtctggatgactgggaattggtaccactagtaacaactggagaacacaggaaagaggatacacagctgggaggaataatggtgaatttagttttggttgtacggagtttgagatgctagtcattgtctatgtgaaaatgcctagcagatacggagatagagaaacagcttggaaaagaggtcagctccagagattatatagagatttgagaatcctctttttgtgggttaaagcgagatgggataagccctttaggacaaaaagcttagacatgggaaagaggagagggcaggaagcgtatactttatactttgatttgaggaataagaagtggagagagacctaaaggtgaggagaaacccttgaggtcgaagtgttacctactgatagctagcacagagtaggtgctgaggtcacagaatgtgacgagaatttcaagaaggagcggtgctcagtgttgcagagattaaggagtatgagattgaaaaaagcctttggatttaagagaaaggaatgagaaacaaattatacctactctatgccagggactttaacatgtattctctctattaattgtcagaataaccttgttattatcttcattgtacagacaggaaactggtgcagttaaggctgtttaagtggtggactagggattagtggccttcaagagaataattttactagtgtttggagcaaggagtggagagacataagccagataactggagtctataataaaaagtatgtgtgtattttcccttttccagaaacggcatttcagtcttgtttgccttgtaaactactcatctttggataaccagactcaaggactttcttctcttcttttgtatcctgacatacctctgctccctaagcaatttgtacttatctttgttataacatttaccagttttaataaatttacctgttgtccttatttcctgtgttcttcagggccaggccttatgtcttcaccatctttgtaattccagtagagcgcctagcctgtattaaatcagtgattttcaactctggctgcacattagaatcaactggagagtttataaacaaaatgaacgcacaggctcctcttgtgggtgaggcctggagtgtctgtaattcctttttgttgttgttgttgttgttgttttaaagcttcccaggtgatctgaatgtgcaactaggattgagtctcactgtatcactgtattaggggctcaataaatgttgactaaaggatgaggagtggagacagtaagtacaaattattcttgaaaaaaattggtagtgaaacaaaagagaaaaatatgtattactactttgttttttcctgctatttcattttaagaatactttttttttgtaagagaacattctagggtgtataagggaaatgattcagaagggaaaaggaaattgaaaacgtaagataaagaatagtttacataacttactttcttttagttgatgataatgcctactttggattcatgggtttcttcatattttaaataaatggtaaaaacatatttaaagaagaatcaatgttgagttctttagatgacccagtttcaggttaagtgctgtgggccctgtttttaattaccaatcaaaatgataattataaaggaaaaaaatttagaggaaaacttattaaaacaaattaccactcttaagtttacccatattaagataaattcacctgacacacagacatgtgatagtgatcacttggtcataaactatttaaatgtcataaagttcaaaaaagtggttttttcctccggttttacctctaattctcaaaagacatagccattttttagagagctgtggaagacaacttcaaataattcttttagttgaagtggaaaagtgcatagtggctcctttaattttactaccagtgtctaaagcagtgaccctttttggtgttacattttcttgagaatcaagtaaaacctataagtcatttctcaagaagactagacacttcaaattttacatctgaagtcccttagggcatgggtgcaatatctggtcacctttcagaatcacgtggagagattttctaaaacatagatttctaggtccccattctctggagatagattcactgggtctggaatagagggtgggaatctgtattttttccaagctttccaggtgagtctgactgccgttcatatctgaaaaattcctaccctaatgtctccttccttgatcatggcggcccataccatgtggaaattataggggctctaggtaggattctcagataaaatactgatgcctcagtaaatttgaatttaagctaaacggtgagtcatttttagtatagctatttcccatagtagtgtacctttggactgctggagagtgcagggtcctttgcttctaaatttaatggctctagatggctgtttgggggttttgttttttgttgttgttttttggtggtgtgtatgtgtgtacatgtatgtctgtgtgctaccatgcacatacattgtctgctttttatactttcatctcctttaaaccttgcttaaggtttaaaaaaattttttttaatttttgttagtttaccatttttatagctgctttggtgaggactctatttcctgttaaggaattgttttcttcagacagttttaaaatctcctggaactcaagttttaccttagtgtttgaaaacatgttgccaaatgttcagcaaaggcactagaacaatctggagaattcatggacataagcaggtgaagtaacattaattttgccatctatttctgtaaattgtggtaatgattgacaacccacagtaaactctcacgttgtaccctcatgttctagatggtaattataaaactgaagtagcactaccaattgcttctgacttccagtaataaacacatcttgaagaggtgacataggctgagggaacccagtcacttccacctgtggtacttcaccatggagcttgtctttgcttgagaaaggtacattctgtaccattaatgcaaagagtgacacagtcaaggattgcaaggcagaaagatacatgtgaagcttatgttcatccagccctccttccctttgttctctttccctgataagtttttcagtcttattcagcaatgtaggtgtaagattgtacatttccaaattccatattccaagtatcataggccattaaaagtactagatgttttgcactcactactttttctgagatatcactcaaggccaaaggcaacaattcaaaaacctgctgatacttgcctggttcatcagggtatcccataatgataccaaggcttttgatcacagcttctcatatcaaatatgctttaccttccatttaaggaggaccagggagttaggaacttcttgaggaaagtaaggcaccactactccacaggatttagctacaagtagtgtcctttttgggtctttgtgactcacctcttcccatcactgtggtaaatgttcggcttctgcatgtgttggtccgacatgatgtgtgaatgccgtaacaccagttagtatcacttgccttggctctttatctggcctcttgatcatactagaaagaatgtggagaagctgatttttctttttagattcaagatgtaggcacgttgtatacaatctgagggcatcagtgtctctgtctttgccagcagcacgtcaagtgcaatgtatagcaagcaatatccaagcatcagcagaaggtgtttttcactgcagtcagagacacttctgatcctaagcagcatctcctgacacttgacaaaaagaaagtagtgcatagtggaaagcagaagacagtttcctgtggggtttatcaaagtgaactgtgcttttacttgatggagaaaacagcattctttcctttctctcctaagggaagggactggggaattctctctaagaataatggaattaggctgggcacggtggctcatgcctgtaatcccagcactttgggaggccaaggtgggtggatcacttgaggtcagcagttcgagatcattctggccaacatggagaaaccccgtctctactaaaaatacaaaaattagccaggtatggtggtgctcacctgtaatcccagctacttgggaggctgaggtgggagaatcactcaagcccaggaagtggaggttgcagtgagcggggatggtaccagtatactccaagtctgggcaacagagtgagaccccatccctccccccacaaaaaaagtggaatcaacattatctggttttgaaagatgaatatccttttttttttttctttccttgcctgaactgtttatgactgaaatctgttcattttcttcagagtcttgtagggattccaaagaaggttgaatggaatcacaaactaccaaatggcaaagtgttcatttttgaggatggccattttaggtcttctaatttgctccatcaaagaacatttctcactatttaataaattaattttatcttcccaatttgtgtactaacaaggagttctctacaggttgaggagtagaaacaagtgaaagaagattgcctaaaattgatataagagcttctaattcattttctttcactccactagcaatatccataaaatctttcccagttacttgatcacttccaaagtctcagtagatttgcaataaattggagggttttttttttttattttttgtttttgagacagggtcttgctctgtcagccaagctggagtgtagtttcacagtcatggttcactgtatccttgacctcccaggttcaagtgctcctcccatctcagcctcccaagttgctgggaccacaggtgctcaccatcatgcctggctaatttttttttttttaaattttttgtagatacaggatctcaccatgttgaccaggctggactcaagtgatcctcccatcccagcctcccaaagtgttgggattttacaggtgtaagccatggcacctggccaaattggacattttaaaatgtttatgttatcccgtaactcaaagttctgatcattattttcatctgaggtatttattgatgtaaacttggattcttcaataaaaattcagttacatagaagtttagaggccgggcgcggtggctgatgcctgtaatcccagcactttgggaggccgaggcgggcggatcacgagatcaggagatcgagaccatcctggctaacacagtgaaaccccgtctctactaaaaatacaaaaattagcctggtgtggtggcaggcacctgtagtcccagctactcaggaggctgagacaggagaatggtgtgaacccaggaggcggagcttgcagtgagcggagttcgcgccgctgcactccagcctgggtgacagagagagactccatctcaaaaaaaaaaaaaaaaaagtttagagcactcaagaggtttgactggctcctgaatttcagggctcagtttctaatgttttcgttcctatgaaggaacttcattttctgcagcctttgtcaggttggctcagatcttccttagttaaaacgttgttgtatgtcaaccacttctctcctcccttcacatccattggctgataggaaactagataatcacacttgtaaatttatgtctgagataaaaataatatgatctgtggagaatctcatgttctcttctaatgtttagactatatttgcttttagaccttatttgctttcttaaaacatatttttgagtatctgaattccttgcttcctgtgtgccttgatatgtccccagttacatatcttaaattcaggcttcaccggtaaggtaagtgagatcttgttttaattgcctcctcttcattccattggtgagggaggggttcttgccctggaattgggaggttgacagaacatacaaaacctgacactggacagatgagattgacagcagtttattaatcacaaatactcagcagcccaggagagaggagacagcacaccacgcaggcccacatgggagttgtgcttgaggacggagtgaacagtcaggggctgtaggaggcagactttagtaagtatcaagagggtggagtgatccctggttctcaggacgtgatccattcattgtttgataattccaagggctggccgggacccaaagcttgctactcagagataagaaggaactgtgtctgttccctgtgataaaagattgtttggctaggggaccttatctgtgggagcagagtgaggagaacttgcagttaggccattcagggctctccctgttttccctaagtgtcaaggcacacgtaatattgagccttaattttagtctttaaaccgcaagtctcaatagtgctagccagttatcaaaggtatttgctaatgattgctgtactaaataatataccaagaagtttttaatagtataatttgatcttagagttttcctttctgtatgaccttttcttctgatactttgcaaagtttaagatattctgctgctgtgtgcagtttcaccacagtagataaaaagatggccaaatcatgtatatgaagtgatatggcaagcgggaagacgagagttcttgtttgagagacctaatggagtgataaggctccagttctgtgtatatgtgggatgagaaagaatggataggttgtaggagctagaaagtggcagaaagattgcaaaggtagtaatagccattatttgagtgcttgctctgtgccaagcacttttctaagtgtattatctcatttactgctagtgaggaaactgaatttagtttgcttaaggtcatgcaggtagtaagcagtggagctgtagtctgaatccctgcttaatgttatttaagagcttttgctgttaacagttaatattttacagccttagaagagccttatatatcatgctaaagattttgaacttaatcttgttggcattggggaaccatcgagtgatcttgacagggaagaaaaatcagaatttgcattgaaaaataccagtctggtggcaaggtggaaaatgaattttggagaaagatgaggccagaggcaggacagctttataacaatccagaaacaaagtgcctgggtctgaataaaatggaatggaatcaaataaaaggggaatggacttgagcaagagacactcgctgatcatgtgactgactgtaggagagaagtgcggaatgatttctaagtagtggcaataattttatcagaacagaaggcaatacatttgaatgataagttcaaggtatctttgaggcattttgatggagatctctaatagataaattatagttagaaaaaggataggatctttgtcttgaatgaggttatgataggtgtgtacatttgagagttactgtgtggtgatgatggaagcaatggaaatggattacctagagatttattttgttcctcacaaaagaatcgtcatagaagacttacgctgtattgggaggcagctatgtaaaaagctgaggacttcatccagagacttcattcagatcttaattctggatctctgttttctctttcataaattaagggtaatatcagctatatcagaataatcatagataatattttattagggcctgaggtataagagttgagaaataatgatgcatgtcatctcccttagtttttacctttgaaaactgaggtttacagaagttaaaatagaaacaaaatcttggctacagatcatttgcctttacttatgtaaagccccacatcttaactgcgcattgccaccatctttctctcctgtgttgctattactggtgtttgaagtgagcagggtcaagtggagggggaagggtgacatcccaagtaagaagaaaggatgttgatgtatgggaagtgaatgcactgcagacaacacagtaatacatgggcataagccactcttgaacagtgtaggacacaaagaaactaacatataatcacttgaaaatgtctgtattccaggtctatatttaagaatattggccaggcgtggtggctcacacctgtaatcccagcactttgggaggccaaggctggtggatcacgaggtcgggagtttgagaccagcctgaccaacatgatgaaaccccatctctgctaaaaatacaaaaattagccgggcatggtggcacgtgcctgtaatcctagctactcaggaggctgaggcaggagaatcacttgaacccaggaggcagaggttgcagtgagcggagatcgtgccactgcactccagcctggcgacagagcataactctgtctcaaaaaaaaaaaaaaaaaaaaaaaaagaaaagaatactgggactatgctaatgcaggcatacttcttatctactgctattgctgctaataataatagctaatattatttattcacccaaggtcacatcgctaatgactagtagaggttagaaatccagcctgggtcagtctggctccagagatcatactgtaaaccattacaccaaactgtttctttttattaggataagtttttgtgatttttgaatgtaaattatttgaaaattaacaatctatctacagcagcagtccccagcctttttggcaccagggacccatttcatggaagacaatttttccacaggggatagcggggtggggatggatgggggaatgttttgggatgaaacttttccacctcagatcatcagacattaattagattctcataaggagtgcacaaactagatccctcgcatacacagttcacaatagggtgtgcattcctatgagaatctcatgctgctgctgatctgacaggagacagagtgcaggtggtaatgcttgcttgcccactcctcacctccctgctgtgtgaccgggttcctaacaggccccagactggtacctgtctgtggcctggggtttggggacccctgatctacagaattgcattagtgataactctcaaaatgttcatttcattgaaatactacattccctcaccattttgaataaataggaatttattcgtgcttatagatttattcaacctgtaatcagtagctactgagtacagagtatggggcagaggaaacagattctgccttgaagggagatttaatgtttatttattcagctaatatttgagggtctgctatttgccaggcaccattctaagcactcagatatgggagtatataggcagtttctcccgctctgattgatttttttttcttcccagactaagtcagtgctacactttgaggattttgaaagcagagggcctggaaagttggccaatttttttttaaagtaaatgaaggtaaatatatttaaccatagatgccatatcaaaaaagtactcatttgtcttgctttattataaagtctaaactagaacagtttatttttgagtttcaaaaatcatgagttggttcaaataattgtaaacttacattttaattaatcagaactcaagtaattagaatcctctatttaatccagaattatttaacttgattttaaggggatgatggctcattgtgaactgcagcaatgcctactagaatttgtttttgtttttgttttttgagagggagtctcactgtgttgcccaggctggagtgcaatagcgtgatctcggctcactgcaacctctgcctcccggattcaagcaattctcctgcctcagcctcccaagtagctgggattacaggcacctgccaccgtgcccagctaatttttgtattttagtagaaacggttttttaccgtgttgggcaggctggtcttgaactcctgacctcaagtgatccacccgcctcggcctcccaaagtgctgggattataggcatgagccactgtaacctgccttttttttttttttttttttttttttttttttttttttgagacagtcttgctctgtcgcccaggctggagtgcagtggtgtgatacggctcactgcatcctcccaggttcaagcgattctcctgcctcagcctcctgagtagctgggattacaggtgtccagtaccacacctggctaatttttgtattttttagtagagacagggtttctccctgttggccaggctgatctccaacccctgagttcaggcaatctgcccaccttggcctcccaaagtgctgggattacaggcgtgatccaccacagtgaccatggaaagtctttaaagtcagttggtgaggaggattagaatattaatttgctttcacattacttacatggatatttttgtagtgttaaccaaagcctctattaaattctagaataacatcacttcttgctgcctgctaatattattgaatatttagggctttcttgaggaagtcacattcttaacaattactacttgaatgatgactgctaacttctttttatccatataacagtataataaaaaagaaatagagccctatcgcacatcagacacaaaaatcaatcctggacagattgaagaactaagtacaaagagcaaaactttaaagttagaaaaaatacaggagaaaccatgcaacctcagagtagagaaggaatttttttccccagtctttaaatacttgactgtattcagggcattcttttacaaaactacagtacaattatcaggctgggcacagtggctcacacctgtaatcccagcacttcgggaggccaaggtgggcggatcacgaggtcaggagatcaagaccatcctggctaacacggtgaaaccccgtctctactaaaaatacaaaaaattagccgggcgtggtggtgggtgcctgtagtcccagctacttgggaggctgaggcaggagaatggcatgaacccgggaggcagagcttgcagtgagccaagatcgcaccactgcactccagcctgggcagcagagtgagactctgtctcaaaaaaaaaaaaaaaaaaaaaaaaattacatcactaatgcaccttcccctccacccccgccctggtccaggatctaaaccagaatcacattgaattttgttgtaatgtctctggtcttgcttaatttggaacagtttctcagcattgtttatttttcatgaccctaactcttttgaagagtacagactgattattttgtaggctgtccctcaagtttagtttgtttcctgataattagattcagcctatgaatttttggcaggagtgtcacagaagtgatatgttctcagtatatactctcagggggcacttgatgtcagtttttcagtttttcttattactgttgataactttgatcatttatttggtaaaggtggtgtatggcgagtttcctcaatgtaaaattactattctttagtaattaagtgtcacctgggaagatacttacaaacaatgtaaatatcctgttgttttattattctgcccaccaactttagcctcccttgatgattttttgcttgctagaattactgtggtggtcacccaaggtggttttctaattcagtccctccttttacatttattaattggaattctatgatgaagggcttttcattttcctccatttgttagtttatttctttatgccagtatggactcatagattcttgttttattctgtgggttaccattcattactaccattatggaatgggttgcttgaagaattattattattatttttttttacaaaaaagtaagcccataagaaaaacaagatacgaaaaaatattgtttgacagtaatacgtttgtattgtctcagacagttgatgggcagaaattattttttttctcagggctcacatgtattttggatattttttgaacaccccaattttatcttctgtataggtcactttatagtgactagtgatgtgtgctcttctacaagaagcgcaatagaatggagcatattttttatgttatatttgttacttatgtgtatatttcataccacataatatttggaatcaagagaaaaaatgtaatttcaagatttaactcaggttatacttgaatctctataggttaacttttcaaaaccactctatacttcttgatgtgattgttgtgaggtatgcttgtcagctgccagggactttatcatggagggatagagttaatctcccacctgtagccactggtccccaacaaaaccatgccccgaaaatccagaattagattagaaataaaataaaactaataactctttcgtgattttgactccagtttgtccagaattgactttgaagaataacatgtggaggaagatggtggataaggaaaaaaaacatttagcagtgggcctagaaatgtatctaataactcactagattctttttaaaaagctataattcccaacggtaaatagaatgtattcacttaccctccatgtttgttagataaactttaaggaaatacatttgtaattattttcagaaattctactcttgggacctacctattgttaactggtattttttttttcttttttgcatttagaaatgagctagaataaataatttttaaaattaaagtcagcgaggaggaatgttgagtctgtagcagtggataaaaaatacctggatggttgaacaatatcttcttaggaaaacagtcaaaacttttactgtgagagacatcctttcttttgtctagggcctgagaaatccaaaggtcagattcttaccttttgaaaatcagaaagaaccagattaaagtatttcaggcacggctggtttaatccacattgtgtttggggttctcagccagtctgctcccttgacctcccaacccttagtggtacttttgacccaccattcactttggatgttgtggaagtccagtaataccttttgattactgtgtacatttagtgcaacagcaagggcaaataagttcataggataaaaatgcagtacagatcatttttgctttcttggtgaaaacccaaaatagagctgacgaaaattctaaatggtatattgccttttttggaaacaactaaaatttttaaagctcaactagttaaatgcattactaaatatgctatatgtgtgctgcttgctatcaggaatttaatttagccagttttataggtagtgtttgtataagtcattaggagtattaaaaataattacctcaaaattctaaaagtgttctgttatcacatttttaatttttgcctgtgatagtgatcaagacttcagtataaatacttcctaacaactccttctctcaataggaaggggatggggcagaaaggggataaggaaatgaagatacttacgtaatcataatagactccagtgtatgtttggcatgcacaatggcctataccctactctctccttgcctttttaaaattgctatttatactttacattttaatagtactcttaaacgttttagaagcaatatgttttgaaaacacataaaaaaatttattttttcaattagcatatagtgagtactcttttttgatgacttttagcacatgtatagatcaatgtaatcactaccaaaatctagatacatactagtacagttccatccaccccagaactctgtttctttttcctcgtctcatttctctgtttgtagtcaaactcttccccttccccacccctcagcttctagcaaccattcatcttttcgtcattgctctaatattgtttatttgagaatgtcatatatagggaatactgtagagttactatgtaaccttttgagattgacttatttcattcagcataatgcttttgaggttcatttcagttgtcacatatattaatggtttgttcgtttttattgctgagtgatatttcattgtgtagatataccatggtttatttgtctgttcacccatttatggacatttgggtggtagattatttccagttttgagcaattatgtataagtttttatatgaaaataagtttgcatttctgaagggtagatacctaggagtgggattgctgtgtcctgtggtgtgtgcttgcttaattttataagaaatggccaaactgttttccatactggttgaatgattttgcatttccacagaaatgtatgagagttcctgttctgcatcctcaccagcactgggtgttatgtcctttttattttagccatactattaggtatgtagtagtatttcgtgatttcaatattcatttctctactgactaatgatattaagcatctttttgtgcatttatctgtcttatatatactctttggcggcgaagtgtctattcaagtcctctgcttactgttttcttacttttggagtcttgtgggtactttatatattctgaataaaaatcctttgttgaatatgccatttgataatattttctccagtttgtaaacttgtcttttcattctcttaacagaagtcttccacagagcaggttttacattttgaataagtccagctcactagttttttttttgttgttgttgttgtttttaatggatcatggttttggtatcatgtctgtgtgtggacaaaacacctatgtttttttttttgtattctcccactcagcacaacaatcaacacagaacacttctgtgacccagtgtttggtggggagaggtgggagtcccccaccaaaaatcaagcaatcagttctacagcggacaccagctgggtgtcatgtaatttaactccaataccatctacctggagatagtcacatcccacaggtggagggctgagtccccaagattgctccttcccccacttcagacaccagtcacaagtccgggcattaggaacttctgactgaccagctatagatccagattctcagaacccccttttcaggttcaataatttgctagagtggcccacagaactcagggaaatgcttacttacatttaccagtttattgtaaaggatacagatgaagagatgcatagggtgaggtatggaggaggggatcagagcctccatgctctccccaggcacactacccttcaggagcctccatgtgttcagctcttccgaagctctccaaaccctctttatgggtttttatggaggcattattatgtaggcatgattgattaaaccattggcgactggtaataaacataaccttcagcccttctcccctccctggagtggaggttaggaggtgggtcagaagtcccagccctctaatcttgcctcctctttcagtgaccagccccaccctgaagctatcagtcaacattagtttggaacactaagaagtttgaagcagaatctatgattgatgtcagataccagatagataacaaaaagatgataagatgataacaaaaatggtatttaaattagtgcttaccaagtactttagatcatttactcttcccaaaaattctatgagctagttactattttatatgcactttttaggtgagatagctaaagtagaggagattaggtaactgtcagtctgattccagaacctaaagttctattaattacaaaatgctgcttctcaagttcaaaactacaaacattccctttgtcttaaatagatgttttctaaccttttgaaggccttgtcatacatgtgacctctaactaggaacatcttcattctagccatctataccttttttccatgtttctctcctctgaaaatggtatctgtgcttagatacatgtacatgcacacataacacatacacaaacacacacagccatttccttttctttccattatttttagtttctacatcaaagcaatgatagtgctatcaaagtggtagatataaaaataaatcaaggctttgtttttgccaaggatggtcccttcatacagtgagtacttgaatgtgcataaaaatcacctggagatgttgtttaaatggtgtttcccaggacctgtctccagagattctgattcagtcagttggtctggggccaatgaatttgcacttttgacaaggtgctgctgaggctgcttgcctaaggactacactttcagggacactacctcagcttattcacaggtaccatgtagtgtgattggatggctcctatacataaggtgctttcactaaactattatgttgggcacatcatctaccctctcagatatattttcattagtgattaatctctttatcaaaataggctttattctcttaaaatatgcctgttagcacacctgttgatgttcaatctcctacttgtctttgaactaagatttcctaagatctggtcaggtctcctgttaaaccttttgaacttaaacttttcctttctcctttttttctacatgttttactaatttgtgagtttttaatcaaatatgtatgtcattgttcttcattttatttatgcctaaatgcgtcttgtcttcacacatagaaaattttgtcattgatttttttttcactttagtttagaagaaataaaattccttataagaaattgttggccaggtgtactggctcacgcctgtaatcccagcactttgggaggctgagatgggaggatcctttgaactcaggagttcaagaccagcctggataacatagtgagatcccttctctatcaaaaatacaaaaaattatccaggtgtggtggcacgtgcctgtagtcccagctgctcaggaggcggaggtaggaggatggcttgagcccaggaggcaggggttgcagtgagccaagatcacaccactgcactccagcctggtgacagagcaagaccctgcctccaaaaaaaaaatgaaataaaataggccagatgtggtggctcacacctgtaatcccagcactttgggagactgaggcaggcagattatttgaggtcaggagttgaagaccagcttggccaacatagtgaaacctcatctctactaaaaatacaaaaaattagctgggcatggcggcacgcgcctgtagtcccagctacttgggaggccaaggcaggagaatcacgtaaacccaggtggcagaagttgcagtgagctgagattgtgccactgcactctagcctgcgtaacagagtgagactccatctcaaaaaataaaaaattaaagttaaataaaataagaaattgtttatctgtaagcagctttgaatctttattcattcagtattgtatattttatctacattcagtctgtatgttgtgattatattaaattattgaaacagtagtgatcttaaggtgattgagtgaaaaagtatcactgtatttaaaatcttaagccattttcagtagagctttgaaataatataattttgcatgttttgtgcttattttagcagaagcctgtgatatggaacatttatatctttctttctgtttcaggtgcgtatagcagcaaaattcatcattcatgcccctcctggagaatttaatgaggttttcaatggtgagtgtttgatttataacactaggcttgatatatcaagccctctttttaaaagaaaaccaaaataatcaaaataagctaaggacagtatgcagaaaaatctgtgttttctgaattacaatgacaatatgttagtctggattttgtaatggctagaatataatgtatttatttatatatgatgattctgttagcaaattaacccttttaaagcctgaaataaattttattcatatcactgactagaatatatcctcattctgggaaaggagagtctttttggtaaatggttttatttaagtaaaactataaacgcatatagtagatatttcttcaatagaactcttaaatagtttaaaaagacaacaggccaggtgcagtggctcactcctgtaataccagcactttgggaagatgaggcaggcaggtcacttgagaccaggagttcgagaccagcctgggcagtatggtgaaaccttgtctctaccaaaaaaaaaaaaaaaaaaaaagccaggtgtggtggcatgctcctgttttgagaggctgaggttggggaatcatttgagctcaggaggttgcagagagccgagatcacacccattgcactctagcctgggcaacagagtgagaccctatctcaaaaaaacaaaaacaaacaaacaaaaaaaagtttcatcatgaccatatattttttggaattgtgaaaggaatttttgtatttcttttaaagaaaatcctatgagatcggtatgaatagccaaaagaaaaagggaaaaaacattttcatcctgcatagagcatgatagcacatgtaaaaacaatttgttatttaaattatgtcttgtaaatcacttcacagtatgcgttcctttaaacttcactggcagacgtttttataattattcacccatagatctgaaatttaaactgctgtaaagtctcctggttactatagactgtagcaatagctgctcctcagcagtaagaacaacatgcctgaaagaaaaatggcctgtagtgatctctttataaaacttcttaagtagttagaaaaatacattactttcaagtactatctataaatgtgttgttgtttcttcttcatatacatttgaacttcaccgtgtcttaaaagtgaatttacacagagctcttcagtttccgttttttaaacattctactccatagtaaactagttaaatgttttttaagaagtttaatcatttttttttcttagtataagatataggactgggcactgtggctcactcctgtaatcccaacactttgggaggctgaggcaggaggattgcttgaggctgggtgtttgcgaccagcctgggcaacatagtgaggcccccctccccatctctaccaaaaaaaaaaaaaaagatataatggaatctcacctcagaaaagattagttttgaaagtcagaaagtgaggcaaaagttgtataaagttaaaattaccctagaaatccctgaggtcatccacaaactacaataatacatgatttagtgcatacaattacatatggcagttcttatgcattttaaaatttaactactgagctgtacttagaaggcagaatggagaattggcattgtaaaaaaatccagaaattaaaatctgctgtttaatataactacaaaatctcatgtagtgaactagggagttggagagaattcagaagtacttttacttcgtgtaagatttcacttcttttttaatattcaggttctgtaacctacatatacattaatacatttgatggttgggggattaaagaagatagtctcttcctccttagggtcaaaaagtggcatgtaacttaaattgataatggtgagactgcactaaagtcagtagcttcccaattacaattcacagagccaagaataaacagaattttaagaaaaattttctacatacttttcttaccttgagttaaatgccctgcatatttaatcaggaaagtcctaaaagaatgtatgcatcctagaaattgctttcctaagtctcatttaaaattgacattgagttaatatattctctgttgagttgtagtaaatttgggcatttaggatgagcctattaaataggcctgggtagagggtaagctatggaatagaagtggggatataggatttatctaataaattttaactgaaagaatatttaagagttagataaaagggtgggcatggtggctcatgcctataatgccagcgctttgggaggccaagcccggtggatcacctgagatcaggagttcaaaaccagcctggccaacatggtgaaaccctgtctctacttaaaaaaaaaaaaaaaaatatatatatatatatatatatatatatatatatatatatatacacatatatatatatatatatatatatatacacacacacacacacatatatacaaaaattagcagggtgtgggtggtgcatgcctgggaatcccagctactcaggaggctgaggcaggagaattgctcaaacccaggaggcggaggttacattgagtcaagatcgcgccactgcactccagcctgggtgacagagtgagactctgtctcaaaaaaaaaaaaaaaaaaaaaagagttagaaaagaattaaatatttgaaggtaaatatgatatgaatgtgattattttctatttttattgaaaaccacagtgtcagaatgattccaaaaagagccacaaaattttagaattacaaagttaataaaaccttaacagttagatggttcccaaatgctgtttcctaggctgactgtgttagaatcatcgaaacatggatttctggtcttcattctcaaacatctcaaacatatagtcatagatctggactagggctctgaaatctacattccttacatctcctgtcctccaccctgtggtttatgtgttgcctgacttggagccacagcctgatttcttctttaagagaaatattttattcaaattatcctctttttatttcttctactcttcttatgataaaagcatggatttattatttttttccagagtagagctgacaaatagatcttgtttttcaatcatttacccatttggaactggaataggcatactgtccatgcaatatcgctgttcattatgtttaaactattgatgataaatttatcaaatagaacttcccactttgtgggataaaaataacagtaattataaatttctctattttttaaaatagttttttaggcagaagcatccattgtttaaaatcagttaatttcaaaattaaaatagtattatttcagtggttagcaaaggatattgttttttgtttgtttgtttgttttgagatggagtctcgctctgttgcccaggatggagtgcagtggcgtgatctcggctcactgcaagctccgcctcccgggttcacgccattctcctgcctcagcctcccaagcagctgggaccctaggtgcccgccaccacgcccggctagttttttgtatttttagtagagacggggtttcaccgtgttagccaggatggtcttgatctcctgacctcgtgatccaccctcttcggcctcccaaagtgctgggattacaggcatgagccaccacacccggccaggatattgttttttaaataaggacctgttgctgaaaagaggtgaggtatgtgaataggcagtgggttttttcttttgaaatggctttattgtaaaaatgattcatagtcattgtaaactttccaaagtacaaaaaagaatctaaacttcacaaaaaattctaccttccagttccctgttgttcaaatgaattacttcaaacatctctcaactaacaagtatatttaacaatacataaatatgataatatacatactaaatttttctcttcctgtttattatattacaaatgtatttccatgttggtaaatataagtgtacattatttttcatggctgcctagtttcacactctatgtaagaattatagtctttttacatttaaccagtttcttaatggaagatatttaggttgtttgtgttattttcatctaatgaaaaattagaatacattgtattatttactttataattgcaactaagtaaaatagccaggtgcttaggaaaaataatgaaagaaaatacagtaagactagaaaagaatttggttttttgatgagagccgtacgtgacttttttcttttatgttttacaaagtgcttggatttttttcaataaaaatgctatttttgaagtcaccttcaaaaataagaataatcctaaatcttttctgcagactttaacataccatatttccagtggagctcatctcccctttagttccttggagatacattacatatagcaggggtgtccaatcttttggacacattggaagaagaagaattgtcttgggccacacataaaatacactaacaatagctgatgagcttaaaaaaaaaaaactcacgatgttttagagtttacaaatttgtgttggattgcgttcagagctatcctaggccatgggttggacaagcttggattttagtctgcctgcattgactgttaagggtgtaaacaagtatgtatttctatttcattccccttcatatttactaaccaaaaccttttttttttttttaatactatgttgtgtgtttggttattttggtcatgagtgatattttgatcttgcttgtgtttggggtgggaggtgttaatacatcaccaaaacaatctgcgttcattacattcttgaaacatataacaataataatgtagataacataattgttttgcagatgttcggttactgcttaataatgacaatcttctcagggaaggagcagcccagtaagtattatttatcatactaacctaactaaaatgacatgggaaaacgagagatgctttaaaagtgtgtgggggttttttgtgggtttttttgttttgttttgagatggagtctcactctgtcgtccaggctggagttcagtggtgcgatctcggctcactgcaacctctgcctcccgggtacaagcgattcttctgcctcagcctcccgagtagctgggactacaggcgcgcaccaccacgcctggctaatttttgtatttttagtagagatggggttttaccttattggccaggctggtcttgaattcctgacctcgtgatccacctgcctcagcctcccagagctctgggattacaggcgtgagccaccacatccggcctaaaagtgtttttaaagcactaatctctgacatagatatttgcacatcaagttcaaatgtgtatgattttatatatcctagccagggtaggagaaaaatattttttatcacagaaggacttagaggtacaactatgacatgaaattattcactgtgtgtctagcggtgccttatacattcagttaatactgtattttggcatttgcaaagttggaagaaattgtggttgctaccatttttatgtagattttgcattttcttttatgtttgaccctaatagcttttgagagcttttaaagttgtgagtttatttactcataaatgcctaacgtagtacctgacacatacatgtacactgaatttttgagtgatttaaagaagtaggcaattctaaatcttaatacatcgtctttgcaccagtgaccccagccatgacttttcgcagctatcctgcaatttcagagaaataattgattctctccctacttctcccaaaataaggtctagagactgttattttaggcttaccgattctactactcatttgaaaatgatgaagtagtgcattctttcttacaaagaaagtttagtatccatccagtcagttacttttcatcctagtataatacccaatatgtaaaatcctgactgatggctgggtgcggtggctcacgcctgtaatcccagcactttgggaggccgaggcaggcggattacgaggtcaagagattgagaccatcctgaccaacatggtgaaatcccgtctctactaaaaatagaaaaattagctgagcatggtggcacattcctgtagtcccagctacttgggaggctgaggcaggagaatcgcttgaacccaggaggcagaggttgcagcaagccgagatggcgccactgcactccagcctggtgacagagcaagactccgtctcaaaaaaaaaaaaaaaaaaatctgacagggaaaatttctctgattttattgttagaacatttgaagcctttaaaaaataaaaaatggcctttatgaaggtagaggttcaacagacttgtgggcatatctgcttttgcttgtgattaaaatttctgttatttatagcagttttttaattgtggaaaaatacacataaaacatactattttacccattaagtgtacagatcagtggctttaatacctttatattgttatgtaatcatagccaccatccattttcagtacttttttcatctttttaagctgatacttgaaagccccaggcaaccattattcaactacctatgaatttgacaacctaggtacctcttataagtagaatcttatagtatttgccttttgtgactggtctattttacttagcctaatatcttcaaagtttatccatattgtagcatgtgtcagaatttccttcctttttagggctaataatattctgttgtatctgtatagcacattttgtttatccgtttatcttccaatggacacttgagttgctcccacccattaattatattaaagtgcttcataggaatcagtgtagtttatccttttggttttagttaacaatttatgagtaaatgaccacttgctcctaaatattttaaagcttattgaaactttttatatattaaagtaaaattaattttctttataataatataaaacatgttgagaaaagtcttatggatgcaaaggaaacatacagcgtttttgaacaatactttcaaagtaagcttttcctttgtgttctctatgttaaataagttgtgggtttcatgtggtgcaaaaatgagtggattttttttaagtcaagaaatgagaaacttggtaagtcagagtactattcatatttatataaatagcatgaaatagttatacatttgactcaagatacgtgaaagtatgggacttttatttgtccaaagaattattgatctgttaatgattgttagatttaatttaaataaattatatttgttgtaagagaaatttgaagatgagcttcatttctcttttattataaaccaaatttctggaacagctgtgatccacacttcatgtgcattgtaacaggaaatacatgatattctgatcttttaagtaaacgagtatttgaggacatcggtaattgtgataaaatatgatgcttatagtatgaccctcagaaaaaactcatcaaaacctttactagaaacttcagattttctttgcatgtagttataatctcagtgaatgtttgcttactagtaaaaaaaaaaaaatagtttgattgacttcagtagtatgcaatttctcaaaactctccatttgagttcatgttgtagacatctctgggtgtctgtgaagtacagaatatatactgtaagtcactgattgacttgactttagaatgctattactctggttcacagtgtcctctctgtgaaataatttctgagcaaaagtagtgttaccctgttcttcatcccacttagttctgaattacttttgtcctcaaaagataataatttgttacctatcattgaggccatccaaaactacgtaacaaaagcttagaaggcattataaaaacatttagaatgtgttccagtggcagtttcactagggtaagtgtatagctatagactgtttctttttcacttgcactttttgatgttgaatttcttttatacaaatacatctttcccacatatatgtatgtttcctcctttcctccacctttgccttgttgctttatctcctttttttttctttgccctttaccgtttttgtagtggggaaaacatgacaattattctttagagtggttgtaatgggacatctttacaaaaagctaccaactcagtatgtttcagagcaaaattagccatactgaagagttggtattgtcaagtcaagaacactttgaaacatccagaaatagctttttattcaacagacattgctagactttgctgtgatgatgagataaataagccttttagggattttccagtggagagtcagacatgtttaatattagaccaagtgaaacgaaatacaatagaggcatgtgaaagggctttataacccaaaggaagaaattttgaatttctatttagaggtggtttttgagctgttttaaatgaacaggattttaatagtaagaaaaatgatgtggctaaacttagggaagagcatggagaaaagtataagatacaacttgatggaaagggtataaaaatctaaatacagtaacaggtgacttagaaattgattgggcgacagaattctgcaagagcagggagaacattgtttttaccgtgtctagtagaatgcttagcttatagtaataagagctcagtaagtatttgcatagatggaggggtggatgaaggaatgatgagtgggtgcatgaagtgagttttatgacctgaagacacttgaatttatctggtccaaactactgtttttgtatctataaagtaagtgaggtggcctgtactggttaatgatatggttgaagcaaaatttggatattatcactcctagatgagtaccttttccactgtactgtgtaattgtcaccatttaacttattttgagcctttaagataaaattttaacctatttcatattacttgtctccttttcagatttcctatttttcctttatcccctcctcccaagttagaggtggatggcgttttatattacgggcaataaaaggctttcagtccagcctgggcccaatttactgtttaaacttatttaaatatgaccttactggaaaatgaatccaaaattctaattgacttggttttaaacatacttttgggataaatcatttaaggattaataatgccctggctgtattgagtttattcttaggaaaattacagttttcgtgaattaggaaaatgagaagtgaatagcttcttttttctttctcacccttgtacacttctgtattcaatgtcatcttttttgagcatgtagtatcaagaatttgacagctaataatttaattctactttgctatttttacatttactagtctcctattaactcatcagtaatgctttgttcaaccaggctttcctttctagaggagactcaggagctaatacctgaaaattcagtggacgcctggccatcccgaataatctggaagtttccaagtagattagagatgtatttctgagtttggaaattctcagtatcctttctgttaagtgacagtgatttcccagattttagatttaatttaaaaatacaatttttagataatattttatactcttgagaattttttctatacatatatatggtaatgtattattctttactcttatggagtagatagagagtagctttattcttggatccatctcgtcaccatttcctacctcacactctgcggtttttaaccttagcaactgcctaactgctttttctggctctcgttgctccactgcccaattcatcatctacactgctgccaaattaatcttctttagaagtacttctgtgttctcctttctcaaaaagcttctgtaactctgctctgtctcccaaataattattccatcattcagagcctttcagttcatttcagtaagtataactgaacacccgctatgagccaggcattgagcttggtgctttctgtgatgttggacctaacttattttctcaggcattttgctcatacggtcactctgctcttttctgcccatccctccaatttccataaaccagagcctatccagtttttcaagtcggtttttcagtatcacagttattaagaaattaccccaattctcttctcttctcactgttgcctcaacagaatgtaatctttttttttttttaagcattctttgcagtgcttcattggtaattctcttactatgcttcatactttgtgttatggttatgtttatccattttctcttttattcacctgtaggcctttgatcagagaatgtatctaagtattctttgcatctcttacagcacctagtctgtttcctggtatactaaatatatacttgaacaattggatgcatctcttatcagtaactaacctttattttcaggttcttgaatgaaaaggccagttatatttactgatttaattttattttgctaaacattgaaagctggacatcattgttcagtttttaaaataggcatgtcattatttgtagttagtataagttcagtaatggagaattacaattttatttattttgcagtgtgcaatgtaggaggagactttattgatgggtgaattttttgaccattgtttttaaaaaacattaaatatataattttaagtaattgccattttcttttttttagtgcatttgcacagtataacttggaccagtttactccagtaaaaattgaaggttatgaagatcaggtatgtttcatataaacactattctttgttttgtttataaccgttaaggtatcctgcaagagctgtgaagtggtatgctgcaagataaaaaattattcatattttaatcataaccacttatgggcaaagtaattgaagttttactttcttttggtgataccagtaatactattagcagaaagtcccttttagaaatactcagatgtagttcatttaagattttagtaaatgattactgtaaatctactttcttatttttttctgggaaaaaaatcaatcccatattaatccaaagtctagaatatatgtgtagtagatttatatcataatttggttgctctggaattctgtagttcttcatgtgagtaatttagcatttagtgattattaaatctcttctttccaaactacaagttagatttgctaagctaagaaaagccacaaaaggtcactagcattttttttttatttagagtttctaataaatagtgattatatgaatgcatttcatgcttgcatgaaggacagcttatgtaaaacactatgaagaagaactggtaggtagaacataagcgaaagtggttaagaaagaacataagagaaagttcttagtggctaatcatgtcaaagcttttatttggcattagtcgttacgtaatatgtagtcatagttacgggggacaagcaaagactaggctagaaggtgacttgtaactgaagggaaattttaagcttatttatagatatgtgtgtgtatatacaaagctatgtagagtgtcattgtattaatctgcaaaatttattttatctctgggaagatttgggttttttttttttgctttttctttactactataaataatgccatattaaacatctttgtacctcttatattaacaatttttttgggataaattgctataagaaaatttgctgtgtcttttaaaaatgttagatagcctccaaagtcactttatgaacctagtgtaattttaatattaaatatttaaaactaaaaagataaaacaaaaaaggtaaacagtatactaacttcacatggactatagattttaaaactttaagtaagatactaacaaataggatttagagatatatccaaagaataatataccaaaactaaacagaatttttacagaaatgcaaaaatggttccatgtaagacatattggtcttacatattaataaagagaaaaatcttatgatgtatcaatagacagtaaaaagagatttgagaaattcagtagccattttctcattaaaaataaaaattctagtaaaatagagaatcgaagaaaacctcttaaatatgaaacactttaacaaaaattaatagtaaatgtcataaactaaaacattaaaataattttagttaaaatgtaaaattagctaggtatgcctgcttatcagcattatcatttatcataaatggagatgtagcaaataagacaaaaacatgagaacttgtaaaatttggaaaagaaaacttatttgtgacatgatttatatatttaggaataccaagagattctaataatataactcccaaccaaaaaaaaaaaagctattagaattaataaaagaatttggggagatgtctgaatttaaggtaaggatacaaaactcatgagttgtcctttattacagcaagtaaggacctgaaactagaaatggtgggggtcagagtgggccagggaattcaatttaaaatgatggtaaaagttacagattaggaataagcttcatcaaaaaaaggcatacgattatgaagaaaatagtgacggtcttctcaagcaacaaaagcaaaaactgacacatgggatataattaaagagcttctgcacagcaaaggatactatcaacagagtaaacagacaacctacagaatgggagacaaattttgcaaattatgcctctgacaaaggtttaaatccagcatctataaagaacttaaatttaaaagataaaaacaagcgcattaaaaagtgggcaaaggatatgaacagacacttttccaaagcagacatacttgaggccaaacaagcatatgagaaaaaagatcaccatcactgataattagaaaaatgcaaatcagaaccacaatgagataccatttcaaaccaatcagaatggctattattagaaagtcaaaaaataacagatgctggtgaggttacggagcaaaaggaatgcttatacactgttggtgggagtgtatattcaactattatagaagacagtgtggcgattcctcagagatctaaaaacggaattaccatttgacccagcaatcccattactggttatatacccaaaggaacagaaatcattctattataaagaaacatgctcacatatgttcattacagcactattcacaatagcaaagacgtggaatcaatctaaatatcagtgatgatagactaggtgaagaaaatgtggcatatatacaccatagaatactatgcagccgtgaaaaagaacaagctttatgtcctttgcaagaacatggatggagctgaaggccattattcttagcagactaataaaatatcttagcagaaaatcaaatatcacatgttctcacttattagtgggagataatgatgagaacacatgacacatagaggggaacaaaacacactgggacctatcagaggatgaagggtgggaggagggagaggatcaggaaaaataactaatgggtactaggcttaatacctgggtgatgaaataatctgtgcaacacctgcatgacacaagtttacctatataataaacctgcacatgtacccctgaactgttaagaaagaaaatagtgatactcttcttgaaacacataaaacaggatctgaccaatggaaaggtgctctacattccattcttagatagaaaattaaattattttaaaagtaatgtatggatttgatgaaatttgaattagaatcctgatcagtttttttttaattggtcaatattttcataaagtttatgtggaaaaaaaaacatgcttgaaataacgaagaaatgtgtgtgtgtgtgtgtgtgtgtgtgtgtgtatgtgtgtatatatatatatgtatatatttatgaaaaaaccattaagcacaatgagggagaattgccttaccagatagtacaagttgttttacagccaatgttaagtcaatgtggtggtgtatggagtagacaaaaaatcattagagcagcatggagaaccagaatttagtctcagaatatatgaaaaattttatacagatattggcataactggtttctataagaagaaaattaagttggacctctgtcacatacagtatacagaaatagatttcaggtggttttaaaatgtgaaaagtggctaacattttagaagaaaatctgagtctacatgtgcaatacagggctagggagaccatcttaaataacactggatacccaggaagtataaaagatggacattttactataaatgtttttaactgtagaatgaagcctatcttaaagaactcttataaattgataagaaaaagacaccagataaaaatattttattatatttgctcacagaagagcaaatgacccacaaatgtgaaaagccatacttagttttatcagtagtcagtggaattaaaatgatatattttctaccatcagactaaaaaaagagctatagtgcctatcattggtggtaatatggatggaaacatactctcatatatgtgtagaaatttggattgtcacaggagtatatattaaaaattataatacctgatgtccctaccaccactgcttgggaatttattcaatagaaataaaaggatccaatggaaataaaaacatcagtatgttaaaatatatgtacagcaatactcatttcaccttttttgttgttgttattgagtcagggtcctgctctgtcacccaggctggagtgcagtgacacaatcacagctcgctgcagcctcaatctcctgggctgagtagctgggactacaggcacatgccaccacgactgactaattttaaaaaatttttttgtagagatgaggtcttactatgttgcccgggctggtctcaacctcctgagctgaagctatcctgcccccttggcctcccaaagcactaggattacaggcatgagctaccacacccagtcttatttcaccatttttaatgtgttcctcctttccccgaaaaaggaaacagcccagaaataaagagatggcacatcagtagtggattggcagactaaattatgttataatcacgtcatgggacattatgcagccatttaaaagaatggtgagaaatatatcacttgactttgagggatttccataggatgtttatattgaaagaagccagatgcagagaagagtgtgtgtgtgtgtgtgtgtgtgtgtgtgtgtgtgtgtacgtacacacacacattttcattgcattcttataaaataatgaccagtcgcttctcggccttttggctaagatcaagtgtagtaaaataatgaccaaaaaattctgtgtgtatgcaagtatagacatgtgtatatctttatctgtaagattttatgactatgaaaaaaaatttagaaaggtatatcctgtgttgttagcatgatatatatcagagggatggataagtcccgacatagctaaggagtcaaagactggaagaattacaagagaaggaaaaggggaaattttttaaataaagcacaaaatatcagattatacattatgcattgtggatgtattatttaaatttatggaaatgaagtatgtttttaaatacttggaagtcaattaaaatcagttgtcaatgtagtttttaagaagcaagaaacagatacgtcaaagtaggtaagactgtgggcccagaggcaaggtgggggacacaccaaagaggatttgcaccagaccaaagccattcaggtaaccaccctgattggaggttctcacaagttctgtagttttgaggaactggagtctgataccagacattgtaaactgttagagttctcaaagcagaaaacccaccaaacccacttgaacagtgtttttagaggttgcattttttttcaccagtagctggaagttatattgggagaaaatctgatctgcactggatgagagtaatgtcattgtctgtatagtcaactcatttgaagtattaatagttgtaccatatggttaaaatatatgcttggagtaggattgttttatagttttaaggaagaagcttaaatgagtgtaattatgatgtatcaatattgaaatgctgtttttttattttttttctaaattcattccatcatcaaaggtattgataacagaacatggcgacttgggaaatggaaagtttttggatccaaagaacagaatctgttttaaatttgatcacttaaggaaggaggcaactgatccaagaccctgtgaagtagaaaatgcagttgaatcatggagaacttcagtagaaactgctctgagagcttacgtaaaagaacattacccgaatggagtctgcactgtaagtcatcagtagcagctttgtgtgtgtgttttgtgtaaatgtgagtctttagcgtctcttaaaatttacagtaacttacagaattgacattgtataatttgtcatttttttccttaaatatttctaagaatgtttactattttttcaagaaattctggataataaatagatatactaggatggcttaaaatagagaaatggttgtaccttgatttaaatccatgtagaaattctaatacattgattaaaggagcaggatatggtgagattctgtaatcttatgttcatgactcgtctcagtttagatcaaagttatttttattaagtcacagaaatcttagaacaaataaaattacttggaagtaaaattatgtgtttctgtattttacagttacatttcttgtgttttttgtgtggttctttcgtaggttcaacctatttttatattttcaagaaatatatggctgggcacagtggctcacgcctgtaatcccagcactttgggaggccgaggcaggtggatcacctgagatcaggagttcgagacctgcctggccagcatggtgaaaccctgtctctacttaaaaaaaaaaaaaaaaaaaacaattagccgggcgtggtagcacgtgcctgtagtcccagctactcgggaggctgaggcagaattgcttgaacccaggaggcagaggttgcagtgagccgagattgcgccactccactccagcccagtcaacagagtgagactctgtctcaaaaaaaaaaaaaagaaaagaaaaaaaagaaatacaaaatatggtagtaggaatacatttcttttttaaaaatttcataatattatttgtaccctgacaggcttttttagcacccccagtttgtgcttcagtggccttttccattgccagagtgatcttttgaaatgcaaatcaggtcattaaaattccctgcttgaaatccttcagagatttcccgttgcctggacttaagagtccaggcttttgaaggtggcttaaaggccctgtgaccacgtggcctctgcttacccctccaacctaactctaccatatatcctagtttatacctgctttctcaatgtaattattaatatcaccagtagcgtaccccatttctttcttggaagtttcctggttaggacaaaaattcatatggtctgcttaagtatctagctctctgattatttgagaaatattgcaacataacctcaaatatcttatgtattacttgaattataacttgttcatcaggattattttggaggaataacgagagttaagggagtacttgttagagagtcctcatttattctagaggattgaaaggcacaaattaattattatttttaaagcagtaggcaagaggtgaaatagcattgtgatacatcacaggcattctcttaacgacctttctcacttataagtaagttaatttattccagtacttttaagtgactaaagaaacagcagcccctaagattgtgaagtgaacaaaggtgataatcacaagctaggtccagttttcacttgcatggaaaaagctagattagcatctgtatgtttaaaataaattatctacttatgaaagtagattatctagaatgttcgtgaatatttcagagtacaattaattttaatgaattgtattttatttagtgtccccttttgtggtccactaataatttgattacgcataaatatttgagaacatgtttttctagctactatattggaatgatggcctactttgtattttatgtgttcttgtcaaagtactgtacaatttgcagtattttatagatttttaaagttggacattccatggccctaaattcattcttatgcttattttctttgccaataaggtgtatggcaaaaaaatagatggacagcaaaccattattgcatgcatagaaagccatcagttccaagcaaaaaatttttggtaagttaaaattttggatattggggagttttggcattgttttaagtctttgtagttcttgctttagtgatttgggctacaccttgtttgtttatgattaagaacaatttagagatggtataaaattttagccttttgatataaggaaggtaaatttgctcaacagcctaatcactaaaggtagtggtaaatctgttgacattcagtggaaagagtatgggactagcaaacagcatcctgagggagcatgtgtgcctgcgagaacaccagttggcaatccatatgctcattctgtgaaggggctgttcctgaatgaaacttatgtgcaggagaacaaagataattatagaacaaaaaatgatactacttttgtgaactttgtgactctgaagtagaggattgctttgtacttggttagccaatgtgaggaaataatgacatgttttatacaatgaggaagattacattcatgccttgtaattttgtgtacaaataattccattattccttataaacttcaagccctcaggagcactgatttaccatactggtcttggacctttgacaagttgttggtcatttttattcttagacaagactatttctgagtacctgttacaaaattctgaggttctttaagactttacaagtccataattgaatgaaatctttacgtttatccctgttttacatgctgaggtcaccagaataagtatggtcataatatttaccttttagtatattagcctttgacttactagccaagttggttggtggtgctattaagggtaaagtaacaggtaacccctgtgggccagttgggttcatggcccaaggttgctccactgcttagccatctcagaaataaatgcagggttgcaaggttaaccaagaatatttggaggaatgcagatccatcatcactgaaggaaaatcaatgccatatgtgaatgtatgccttaatgactagccacagttccctaaaggttctgtcatatagagttacttttatggacttaatataagtgtagtttctctgtgttgggtctaaaatcttgtagcattaatctagaatcctgaaacaatatttataaaattattactaatttatgttatttatgccaggaaacacataataaaatcaatcttgttgagatggagctactattagaagaaaattctttttactacgttcttctttataatacattggagctgttacaataagcttactaatttgtctttttaaaatctaattcctttgagctttaacatatataaaatgaagaaaatgtctgtccttgagttttattttctgtttagagacagagtcttgctgtgttgcccaggccggtctcaaattccagggctcaagtgatcctcctgcctccggttcccaagtagctggaactacaggttcacatggtgcccaacttgtcattgaattttctattctcactatttcactttacaagggtaatttttcataagccatcactatgagcattgtatcacttaacttaatggctttcactttctggaaaaaaatgtattttatatgctttgatatgatttttccatagtgataatatcatggcacaatagtctcagtaaaatctaagtagttaatacaaagaactatacttcaagccaggcatctgtaatcccagcacttttggagaccaaggtaggaggatggccagaggccaggagttcaagaaacctgggcaacatagtacgaccccatctctaggaaaaaaaaaaaaaaattagccaggcatggtggtgcgtgcctatagtcctagctacttgggaggctgaggcaagaggatctcttgagcccaagagttcaagcctgcagtgagctataatcacgccactgcacttcagtctgggtgacaaagcaagaccctatctctagaagaaaaaaaaaagaaatatacttcagttcatctaaaatataggtagagtaaaaatcagaagcaactagtcttagatgtttcttagatttcagtagagaccttctcttctttgtctctaccatttctccaggatctagcagtattaggggcttaatataaatgtttgttgagtgaatacatatttgtaattacagagttaataaacgagaggggcagaatataattaaaggctaggacatattggccatttactctactaataaaagagtactatctactcagtgtcatttactgttactgtagtaattaatgcctttggaagaatcttttgaaatagttctcaaattggtaccactacttggtttggaattatttttttttcttttcataatcaatggttatataaatgtatattgtcctagtcagtattttatatatgctaaggactcactagctggcttggcactaatacctcaataaaaggaatacttcttttggaatcatgaaacaaaagtgaataaacctccaagttatttttccaaccaaccttctttgaaaaatcttggatgagtcactcaaatcaagacatgttataaaattatctgttattttgtagaacatatacattgttctaataataattttcaaatattcagtgtaactgtaagtatgagaatacaggttgaatatctcttatccaaaatgcttgggaccagaagtcttttggatttcaaatttttaaatatttacatcatacttaccagtttaacatccctaattcaaaaattcaaaattcagaatgctccaataatcgtttcctttgagcatcatgtcagtgctcaaaaagttgcagattttgaggtatttcagatttttgaattaggaagactcaacttgtactatcattctatagactttatgattgggtagactacatgagtattgaacccagaaatcattgtctagcaaaagccagtatagtgattaattaccctgtgactattatataatgttcaaaaaagctaacatattagaatgtccttagcgtgcagagagcaaacagagacaaaaagaaaagttaccctgaaaagtttgtcagaaaaatagaatatcagacgctaaactactcatccagaattttgtcaaaaaagaaaaataagataaaattcactggtagacaaaaagtagtaacataccagtttgtaatttctcagtttcaaaccatgaatatgtatttgtataccaaaaatcatttcaggagcagagaaggaggatatgccttttatgtggagactttaaacataaaattggaaaactaaaaaaaaaaaaactcatgttaataagtatagtcctttatttccagatatcaaaacctctttaagagtgttgtataacatttactagtcattctttttaaattgtatggtactttgtatcattcagtagatgttaaactacactgagtgtattcataaaagcccctgttaatctaaacatttattccatttattttggaaatataagtgatttgattgaagaagtagcttaaaatttatctccacagtagcttatgacttagttttgtattggtttttgttttgttttgttttttttaaggctagtcaagtggagatggaacaaagaaacctgtaactgattgtgatcaattagtggcaaacagcactgcacacacaccagcctgaattgtattttaagccttagctttagaattctggcattaaatccattatgtaagttctttcttatcagtagggtgaaaattaaatatgtatcataactggacttaaccttttgattatttttgactatttcagtgattaaaaatttaatgtccagtattcatcccccacactctctcatactgtagcatgaaatataatctgaaacttaaaattgattcaaattattttccctaccttatttacagctgctgtttttatttttaaggaatggtcgttggaggtcagaatggaagtttacaatcactccttcaaccactcaagtggttggcatcttgaaaattcaggtatgaaaaataatttgtttactgatctttagatgattctgaacagagaaacaactaattcctaagtttacattttcatagtatatcatacacatttctttttcaggtctttgttttggggtaatgggaaaaacaatagtgctgttttaaatcttttaaataacctggcagtttattccctagtcatcaaaaatctgcaaggatagctgacagattataaaacacagctaaaattagatgctgccatttggtctgctcttcagatacaatttgttcatgcaggcgtcttctgagtttgagttgtgtacttctctcctctgaattgggtggagtggggtgaagtatcatattaatatatgcatgtgtgtagttgtataaatatattgtatgcatgtattaacgtgtatgtattggctgggcgcggtggctcacgcctgttatcccaacactttgggaggccgaggtgggtggatcacaaggtcaggagatcaagaccatcctggctaacacagtgaaaccccatctctactaaaaatacaaaaaattacacgtgcctgtagtcccagctactcaggaggctgaggcaggagaatcgcttgaacccgggaggcagaggttgcagtgagccgagattgcgccactgcactccagcctgggcgacagaacaagactccgtctcaaaaaaaaaaaaaaaaaaaaaagcatacgtgattgtttgaagatttagttaatatggctaaaagggttaggacagacagacaccaagtactcgatgaatggtagtcattattgtcagcattattcttccttcacttaggcctcagtggcgcttacctggataattacagcagttttaaaatggtgccccttgtaggaccaaagcttattgagagcaaggattgtctgattcacagtacagtcttcagcatttagcatagtaccatatgattgttattttgttgaattggtggactctttgacattcacactgccatcaaaaagatagttttttaaatttaaatgtggatatgttacttgactatgtaagaccatttagtagtacactctcatctgccagatagtccagacatatttgcatgacatacaaggcccagagttgactggtttgctacctgtatatatttctacagctattactctccccaacttcacatacctctagtcctctctgaaatatactgaagccttttttaaccctcagaaagaatctagagtactgctaacatactttatacatacctttaccatgttgtgctgaaatacgagatcagggactgtgtctttttaaaagccatataacctcagtaccttatgtagcagcagtgtttacagcactcattcagtgtttgttgagtaaattcatgtctgagtttggggaattaaatggttggtggaaatacacaaaagaagaacaggattgggaaggaatattgtgagctcagatttggacatcttggttttagataccagtagaatgaatgactgtgaggcaaaaatgtccagcagtcaggtcaatagaaggcttgcctgaataactacaggaatatctctaactagtctcctcactaggctgagggcaggaagagtcttgctggagttcaaaagttttggggctcagcagagaagtctagactagagctgaaatatgtagtcagtctgcattgatatgcttgttgacgcaataaggttcttgatgattcctgtaatgtggtttctgtaatttctttttctaataggttcattattatgaagatggtaatgttcagctagtgagtcataaagatatacaagattccctaacagtgtctgtaagtaattaattccacaataaaatttaacctaatacttctgtaaaaccagaacagttttggaatgaacattttaagtaatatttctgcttcagattaccgtgttttctgatagattaaagataagtaattgcaaacctgtacctaacttttttgcagctttgagatataatttgtataccattcagttcattcatttaaaatataagcttcaaatttttctcttttttttttgtatattactaacagggttggacagcagtcaccacaatctaattttagaacattttcatgctccttaaaagaaacactgtaccattagcaatcattctccattctacccagcccttcccccagaaccctcccagccctaggcagtggctaatctactttctggctctgtggatttgcttgtgctggacatttgatataaatgtaatcataatatatagtcttttctgactggcttttttcatttaacatgttcaacattcatcctttttggagcatgtattagtacgttgttcctttttattgccaaataatactctgttttatggacataccacattttatccattcttcagttaatggacatttctgtgttctactttttgctgctgtgaacatttgtgtactattttttgtgtagctttttaaatttatttttggtatatacataggagtggaattgctgggtcatttggtaactatgtttaaccttttgaagaactgccagactgttttccatcttatagtttcaccagcagtgtataagagtttcagtttttctgtatctttttccaaaatgtgtccttttgatgatagccatcctagtcagtatgaagtagtgtcttattgtggtttttatttacattttcttgatgctaatgattttgagcatcttttcttgtgcttatgatcatttgtatatcttttggggggaaatacctattcagatcctttgctcatttcctaattgattattcacatttgtattactgagttgtacttgttcatatattctggatacaagtccagtgtatcacatacatgatttcagatattttcatccttctctgtgttgtcttttcactttcttgatgatattgtttgcaaaacagaagattttggttttgatttttttcttttgtcatttgagatttgaaatattaatagaaaccattgtctacccaaggtcgtggagatctactccagtgttttcttctaaaagtattatataatagttttagctcttacatttaggtctatgatcttctacctaacttttaaactgtatcctatcttttcatttcagtagctatttggatcatgatttaatgaagttttttttttaagttcatctttcaaatttaagaatttttgaacttggttttatttctccacagaattctttcacacattctttcccttgcatatgcaactgtttccttgttgatttttgttggtttggttggttttgtttttttgagacaagacctggctctgtcacccaggctggcatgatctcagctcactgcaacctctgcctctagggctctagccattctcccagttgagcctcctgagtagctgggactacaggcacgtgccaccacacccagctaatttttttttttttttttttttttttggtagagatggggtttcaccatgttgcccagctagtcttgaactcctggactcatgcagtttacccaccttggcctccaaaagtttggcttttggtttttttgccccatggatattgacagtataacatttaacagtgacattttctcatttgtttgtgtcatatacctaaaagtatctgtgtattataaacatcaactgcttatatacaatttacagatattaaagaaaattttttttttttttttttttgagacggagtctcgctctttcgcccaggctggactgcagtggcgctgtcttggctcactgcaagctccgcctcctgggttcacgccattctcctgcctcagcctcccgagtagctgggactacaggtgcccactaccacacccggctaattttttttgtatttttagtagagacggggtttcaccgtgttagccaggatggtctcgatctcctgacctcgtgatccacccacctcggcctcccaaagtgctgggattacaggcgtgagccactgcgcccggccagaaaaatttatttttaactcaagaaagcatttaagaaacatgtatgaatgtgttaagacagatgctacctaagaagataagctatatttacatatacatacatacacacacacacacacacacacacacacacacacacacgtatttttttgagacagggtgtcactctgttgcccaggttacagtgcagtgtgtgaatacagctcactgcagcctcgacatcctgggctcaagccatcctcctgcctcagcctctctagtagctgggactataggcgtgtgccaccatgcccagctaatttattttttgtagagatggggtctcaccatattgtccaggctggtctcaaaccctggccacaaccaacctttctgccttggcctcccagagtgctgggattacaggcatgggccaccacacccagcccctgaagctatcttttaaaaaaatttttactagcacttaggtgatttctgctttgacctaattggtactctccttgcaaaatttgccagtgaaaaaaacttactaatgtctgattttccatgagatgttctccatatagttacatatcatatgtaattactacattcaatattattgacataacaagggtatggtgccgtcttgtttggggagtttgacattgagcgaagatgcttcctggatgggtgcggtggctcacgtctgtaatcctatcatttcgggaagctgaggtaggtggatcacttgaggtcaggagtgcgagaccagcctggccaatatgacgaaacctcgtctctactaaaaatacaaaaccccatctccactaaaaatacaaaaatgagacgggaatggtggcacattcctatagttccagctatttgggtggctgaggcatgaaaattgcttgaacctgggaggcggagattacagtgagccaagatcacactgctgcactccagcctgtgctacaggctgagaccctgtctcaaaaaaaaaaaacagatgcttcctaagagaaatttgtccacaagagtacagagggtacggttttgagagatggtcatagtaattaaacttgactaatatgccagtttgtgctcgtttttttaggaatgaccatttttactctatcttaggaggttttcattgttttatatttttacaccatatatataaagtataaggtgttagagacttttacattaacactgttttattttttaaatccagattctgttaactttactgttaggaaaaagcaaacaaacccatctattggcatgttaaaaaaaaaatttccagaaaaatacattcttcctgattagtgattttttttttttttttggtatcactgttctgttacgtaatgttcagtaaatatttaacaatattcagataaagagtcatcaattagaaatctttaccaaacttcttacccataaaggttgtctattggaatgcatgtccagtgtttaaaattgaacttttcatccatgtgtgtatcattgagatttcactttccttagccagctgaacattgagaccagcttattctgtagacttttaaaataattttacctattttccccttagacttagaataattgatcttacaatatttattctatgtcataatttccttctgtgttatttattataacattacattaaccatacatatattttaaaataatagtggtttagttttaaattactatttttattttgtttttttttttttcagaatgaagtgcaaacagcaaaagaatttataaagattgtagaagctgcagaaaatgaataccaggtatgattttttaaatattatataagctacactcacatatgaattaatgtcactgaaattttaatttcagccaaaggctgaatttttccattgcatcagttagagtctttttgttgtgtgtctgcttttaacacaaaggcagacttactaatgtgtaggcaaaaagagtggcaagtaaattgaattccattaatagtttgtgttttcaaaatactaagactaggccgagcgcggaggctcacgcctgtaatcccagcactgggaagccgaggcaggtggatcacgaggtcaagagatcaagaccatcctggccaacatggtgaaaccctgtctctactaaaaatacaaaaattagctgtgtgtggtggcatgtgcctgtagtgacgagtgctactcgggaggctgaggcaggacaatcgcttgaacctgagaggcagaggttgcagtgagctgagatcacgccactgcactccagcctggtgacagagcgagactccgtctcaaaaaaaaaaaagactaggttttggccaacataatttctgagtgcagattgagtatctctgatctgagttgcttggaaccagaagtgttttagatttcagatttttttggattttggaatatttgcattatctatttaccagtcaagcttccataatctgaaaattagaaatctgcattagtgcttcagtgagcattgcctttgagtgtcatgttgatgctcaaaatgtttcaagctttggaaactggatttttcagttagggatgctcaacctgtatcagtcaaaatatgccagactttaagtggctattttttttctggttggaaattttaattcaggctgtgtcttagcatttggattatgtgtaatctgtttagatcacatttcattttgtgctttactttttatattatttatcagcttctaaactacactcttgaattgaaccatttaatttgtgaattggacaagtttctactccttaaaaataataatctataaattgttctgacatactaaaataaattcaaaatgacacacaaatattaagtctaatttatagttttatttcattaagtttattcaaaattattataggctttttcttctagctgcttttattttatttatttatttatttatttttgaagacagagtcttgctctgtggcccaggctggagtgcagtggcgcgatctcgcctcactgcaagctccgccttccaggttcacgccattctcccacctcagcttcccgagtagccgggactacagacgcccgccaccatgcccgactaatttttttttgtatttttggtagagacagggtttcactgtgttagccaggatggtctcgatctcctgacctcgtgatccgcccacctcagcctcccaaagtgctgggattacaggcgtgagccaccgcgcccggctcttctagctgctgttaaacagcttttaaaacaatgttgggattttatttgactgtttaaaaacagtgaaacaggctgcttaaataaaacttattctgaaaacatctatgtgctttataaattgttctgttctttgctttactttaaacttctaactattgtttttcatagactgccatcagtgagaattatcagacaatgtcggacactactttcaaagccttacgtcgacagttgccagttacacgcactaagattgattggaacaagatccttagctacaagattggcaaagagatgcagaatgcataagatgaacattgcatgaccggatcattttagtgtctttgcgttaaaaaatcattgcaaaagtattctgaactgtcaagctgcccagtcagatgggctgttgccatttaaaatcactgtaattaattagtttgattagagcacaaagcttagctaatcaaccattatttttcattttgtttgttctaagaggattgaaaatcagtttagtttaaatgtctttctgttaggcctttctttcttacaatgaagagatgattcttctagtttatggttaaaagtttttgaagtgtctcaaaaatattttactaactgtaaccctaaaattgatgtcttttggtttatgaaatcagtaatttttgatatttccccagttctttttaatggggtcaataatggacattctagtttaaggtggttgatggatttagccatatatgctgctaaagaaattgtctaccttttcttcctcacctgttccatttatgtaaagttgagattagagggaaagcattttctatatcaattgtgtttaaacctttcaagaaggttatttagctagcttagtgttgaactaaattttttttaaacaaggcaaggtctaatgctgttttgagattctgaaattaatgaaaatacttatttcagaaatgcatttaatgctttttttcttgtgacagttacgcaaatcagcttgaattccatatgtccctgagttatttttatcataaagccacaaatgtattataacaaggcaaattgtaatatatataatcctgaactcatgaccatgtctcggtttattttttttttcttggattgaaaagtactgaaattcaatgtgacattaaaatgcaaattttcctatttatttgagtagaaaatcacttaccagtgagcatatatattttaaaatactttctttggatattgtaattcttaactggttgtaaattagaaaagctgggattacatatggtgtgcggttacagtctaaattttttcatcctcctatgcatcataagcatgtttgtaatattttcaaaaatagttctactgatgctacaggaatttcaagcctgtggtgaatgttagtatttaccatagggagtgaagtggagttatggtttcattcaatagagtattgctgattatacttgagtggaatcctttcctcacgtactcccacagacgtctgggcctggaaattttttttttattttattttattgtttttttttttagaaaaacaccacttttattatgtacaataaaatatttcattagcttgaattgtatagatttttaaaaattcaatgaaagcatgttgtttaatttctttttaaaatcactgttgggctttgaaagcattgagaatataatatgaaattatgacattttgtctaaatcatcttttctttagttttaaaatacaagttttggcacattgggattcctaaagaaaatgaattggtaacattaattatctgttcctttttaaaatatatatatttgaaagtttgatgatggtgaactaaatactagatctaattgacaagcttagttgtatcagttaggccatcatgagtttctatcccatgaaagtcatcaatttcctatctctgttctagtctggaatgcattactgaaaatgtatgcaactgtttttaaggtgatttgcttgtgagacggaagatttatcaaaaataatttagaacaggctgggcgcggtggctcacatctgtaatcccagcactttgggaggccgaggcgggtggatcacggggtcaggagattgagaccaccctgactaacacagtgaaaccctgtctctactaaaaatacaaaaaattagccgggtgtggtgacaggcgcttgtagtcccagctactcgggaggctgaggcaggagaatggcgtgaacccgggaggcggagctcgcagtgagccgagatcgcgccactgcactccagcctgggtgacagagcaagactctgtctcaaaaaataataataataataataataatataatttagaacagtctgaaataatgatggcacagaatagtcttttatagtataagaatggcatttattaggcagggcacagtggctcacacctgtaatcccagcactttgggaggccgaggcgggtggatcacgaggtcaggagttcgagaccagcctgaccaacatgctgaaaccccgtctctactaaaaacaaaaaaaaattagccggggatggtgatgcgcgcctgtaatcccaactactcaggaggctgagacaggagaatcatttgaacccgggaggtggaggttgcagtgagcagagatcgagccactgtactccagcctgggtgacacagggagcctctgtctcaaaataataataataataaaagaatggcatttattaaagtgaaagaagaatggaaacccagagtatcctatagctcagggatgtaattttagtaggagacattatggctgctttgctgagtaggctgaagtgtggtggcaaaggcataatcagggagaacagctaggagactactgcagtaatctagttgagagagcatgctggcttggactgaggtggttgctgtagaggtggtataaagcagtgaggtctaggtatatcctaaaggtaaaatcagcaagacctggggagagtttggtcatggagtgtgagataaagagaaccatgtctggggctggagaaattgaggaagattcttgtaggagcaagttggtttggagaagaaggctggtcaggagctcagttttctattcaaaggagaaatatctcatgtagcagttagatacaggagacaggaactagaggaaagctctgggctagaagaatgggaaagtgcatgaacctggaaacaattttataggcagacaggatgaaggacctcaaggttagtgataatgaatttaaagtaaatgagaccaatgatgagcatggctgtatgtttttcttcaaccgtgtaaagctgtttgggtgcaggcatagagtagatgaaataaatttcaccagggctgtggttttgcccagagtgaatgaccacatgaagaggggcagggtatgatgatggtctgtggaatttcagctgggtaagcagggaagtgagggcttgagacggggggagggatagtgaaaatgtacaaccagtggattataggtgtgttaaagtaggggaactagaaagaatgacctggaaatgtaagaagtgggccgggcgcagtggctcatgcctgtaatcccagcactttaggaggctgaggtgggtggatcatgaggtccagagatcaagaccatcctggccaatatggtgcaaccccatctctactaaaaatacaaaaattagctgggcgtggtggtgtgcctgtagtcccagctactagggaggctgaggcaggagaatcgcttgaacccaggatgcgaaggttgcagtgagccgagattgtgccactgcactccaggctggcgacagagcgagactctgtcccaaaaaaaaaaaaaagtggtgggctggccacgatggctcacgcctataatcccagcactttgggaggccacggcaagtggatcatttaaggtcaggagttcaagaccagtctggctaatatgatgaaaccccttctgtattaaaaatacaaatattagccgggcatggtggcacatgcctgtagtcccagctactcaggaggctgaggcaggagaatctttgaacccaggaagtgacagttacaacgagcggagactgtgccacttcactgcagcctgggtgacagggtgagagtctgtctcaaaaaaagaaaaaggaaatgtaagaagtggtgattggagaatggtgtgcttaattaaaattgaggttttgaggagttactagtaatgacaaatatgaccaacggagtgactggctgaggggagagaggagaggacttaagcaactgtgccactcagcattggaaaggtcacctctgtgacattaaaatcaagaattctgatagaagtaagagttctggcatgagtggtgcttttccagagtacacttggatatatgattacattttaataagttatataaatatgcagatattcatgcggcttttcctcatttgggattttggaaactaaaatagtagtaagagcattaaaaaaaagatgtcctggaagttctcgttcattgcaaatgttcttgaaatgtgaaattcttggaaaagtaatcagggacaactattgacagttgtgtgacatttgggtagccctttctacagttaaagtcattgtgacttttagtagccacactgaaacctttggaataatgaaagaccctttcaaaagatcttccatactgatgatcagtttgcgcctttgccatctatggggtatgaaatgtaaaggcacatttagccaggagttaacacaggtgttttgtaatgcgtgcatgttatgaaacatcccaagaaagatgtgtatttctgttcacttctcttaagatgcagtatttaaaagaatcatagtgtacttgctagtcttaaatgtaaattttgggccaggcacggtggctcatgcctgtaatcccagcactttgggaggctgaggcaggtggatcacctgaggtcaggaatttgagaccagcctgaccagcgtggtgaaacctcatctctactaaaaaaatacaaaattagccaggcgtggtggtgcacacctgtaatcccagctacttgggaggctgaaacaattgcttgagcctgggaggcagaggttgcagtgagccaagatcacgccattgcactccaaagagtgaaactccatctctgaatgaatgaatgaatgaatgaatgaacgaatgaatgaatgaatagtatagatttgggggcttgaaactgaggacttcttaaaggcagatgctgtgtagacatatccaaatttgacattctgagtattatgcaaaagctttattgtaagtttgaccagtagtgctagctattgcagaatacgcaaaatattcacaggttaagattaaaatagccgattaaatttttaaggtctagttagcattagaaattaatgtcaggtcattcacatttaagcagatgtattgagagagctgttctaggcgttgtggagtttggaaaatagaaaaccgtttcttaaagcaatctacaaactactcatggaacaacagtgttttcctacccttgtcacatcacaacatatgtagaaaatgatatttgtggctgggcacagtagctcacacttctaatcccagcacttcgggaggctgaggcaggtggatcctttcagtctaggagttcaagaccagcctaggcaacatggcaaaactctgtctctactaaaaatacaaaaattagccaggtgtggcgtacgcctgtagtcccagctactcaggagctgagctgggaggatcacctgagcctggacaggttgaggctgcagtcagctgtgatcgtgccactgcactctaacctgggtgatagagtgagaacctgtctgaaaatatacaaataaataaggcacactgcaggaaatggacaaggctgcatgctaattgttgtaagggttaagaagatcagtatcttggcacaccttaaacctgtttaggaagatgtgccatggacaacacagattgtttgtaagataaacttcaagccttacctaagatagcttttaaagagatgtcaagccaagggaggttttctggaaaggatgagttttaaactgctttggcaagtatgcatgccagtggtaggaaggaaatcctcttgtatctcagtgaagcattaatatgtagataataggtttctggtaaagaaatgtcatgggtcagaatgtcatccagttcaaaactaaatctgactttaaaacagcacagtacaaaatgaaattataacagtaacgttaagaatcagtgttcttataaactatagtatggctaataagatattttctctctggttttggtataatctaacaaaagagtattagttaacgtcagtttccatttttgcagtgtgactgtatcagaaaacagattttttttcacacaaactcgctagaaaacacatcacgggttgggcgcagtggctcacgcctgtaattccagcactttgggaggctgaggcaggtgcatcacaaggtcaagagatcgaggccatcctggccaacatggtgaaactccgtctctactaaaaatacaaaaattagctaggcatggtggtgtgcacctgtagtcccagctactcaggaggctgaggcaagagaattgcttgaacccaggaggcggaggttgcagtgagccgagatctcaccactgcactccagcctgggcgacagagcaagactccgtctcaaaaaaaaaaaaaacatcacggataccaaatcagccactgactctcataacatgagctgtgtgtgggacaatctgcagttaaagcatgctgattagtagaagactgttaaggaagcccagttggcatatcttagaagattgatgacttctgggaaaatttgtaaaatgcccagctctttaaccaaataaattttcaaggaattattttactgcaaggatatcccaaaaaatcttgctgactaaacagcacaaagtgtcaccttcctttgggctgctaacttgctagactctcagcgtctgaatacctgatctggatctcttccatcccagactttgacctgaaaatgaaggcttgcctcctgtttcccaaaagaatactaaacagaaatagccgggagcaataactctcttaagtataaattaaggacttagggaagactttagttctttgaaaaaggagagcaaaatataggagatcagtgttccaggacactgaaagcatctccagtgaggaaaaggcaaggtaaagaaaagcctgcccacgcacactcatttgccccttacttcggggctttacagaggagaaagagaaatttttaaaggaaataaatctcattccagagacttgaaaaggcaaaaccgtaagtcaacctaaatatccaaccacagcgaatgagtacagatactgtggtttgttaacactgggagagcatacagcttttaaaaacttgtgagtcagaggttatattaacatactatgaaaacccctgttgagagaacaaaacaagttgtatactaacgtttaaaaatacataaaacaatacaaatgttttatcattttatatatagtgactctataaacatacaatggattaaaacaccaaatcaggccagatgtgtggctcacacctataatccaggcaccttgggaggccaaggtgctagaatcgcttgagcccaggtgttccaagatcagcctgggcaatatatcaagaccccatttctagaaaaattttaaaattagctgggcacagtgatgtgtgcctatggtcctagctactcaggaggttgaggcaagaggatcacttgagcccaggagttcaaattacagtgagctttgatcatgtcactgcactccagcctgggtggccaagtgagaccctatctctcaaaaaaagtagaataatatatgtgtggggaggaacataagggaataggattagggaactgtataaaaggattgtaactttttttaattggataataggtatataggtgttcattacaacaatctcaaattttaaatgtcatttaaaaaattatacaacttatgctgacatataactctacgtgaaaggaaatatatacaaagattgagtcgggcaaaagtagaaaaatgacaggtcataaccataggatgaatagaatagaaagtttactaatacccctttaaaaagtcattagactcattattttacagagaattttatccaacttaccacatacagataattttctatgttacagaaattattttagatggtagaaaaagatagatatcattttatgagacttatttataagcttaaataagaatagcaccaaaaccagaaaactgatcaaacttccctgtatagtcaaaagtaaaattccttaatacattaataaagaatactacattatgatcaagtatggtttatcactggaaaccaatgattgttccctgttaggaaatctagtacagtagcctcctatattagcatattaaagaaaagcacatataattctctgagaaaatatcattaaaccatttgataaagtttagtccctaatcctcactttaagggcagcatctcaaatcaatggggcaacagatgaatgatgctgagacaacagggtagccagctgtgggagaaaagttggatctatacctcataccttacaccaagttaaaattgcaccaaagatttaatgatataaaatgatattggccacgtgcggtggctcacacctgtaatcccagcactttgggaggccgaggcaggcggatcacttgaggtcaggagttggaaaccaccctgtccaacatggtgaaaccccgtctctactaaaagtacaaaaattagccgggtgtggtgatgggttcctgtaatcccagctacggaggttgcagtgagctgagattgcgccactgcactctagcctgggtgacagagcgagattccatctcaaaaaaaaaaaaaaaaagatatcataaatgttcttgaagaaatggtattttttaagtaatagcaatatcagaataattttagaaaaaacccttagaatccattcaataaaaataaaaatgtatttggctgggtgcagtgtctcatgcctgtaatcccagcactttgggaagccaaggtgggcagatcacttgagttcaggagtccgagaccagcctggccaacatggtgaaaccccgtctctactaaaaaataccaaaattatccaggcatggtggtgggtgcctgtaatccgagctacttgggagactgaggcagaagaatcgtgtgaactcgggaggcggaggttgcagtgagccaagatcgtgccactgcattccagcgtggacaacagagtgagactccatctcaagaaaaaaaaatatatatatacttcataaaaattaagattttctacatggcttaaaatgctctaaacaaagtcagaagacatcattcacaagggaaaacatttgcaacttacctaacaggtggttactttttcaaaaatctaatgagtacctacagcacaataacataagagtcctatagaaaattgaaaagcatgggccaggcgtggtagcttacacctctaatcccagcactttgggagactgaggtgggaggatcacttgagcccaggagttcacagtcagcctgggcaacactgtgaaactctcttgtgtctataaaaaaaaaaaaaaaaaaaaaagaaagaaagaaaattgaaaagcagtgcctatggcacctgagctcctgacattatggagagccttaccaaacttgaacttcctcactggacatttattgagaaataaacatatttaagccactgctctttggaatgtattttatttcttatcacccctgccacccctgcaacccctgcctctcaccctatatagcatttagtgccagaaataggatcctgcaagtatcaaaatctgaagtgtggcattggttaaaggcaatgtaagtcaacaggggttctgctgacatctgagtccactacaacgtgcaagactgttctcctctatccctagacactaaatgctactgacacctcctaatccttgtaacagtcaaaaataatgccctagaggaagggaatattactccagtgactagggggatttagtagggcctagatattgcaggctggaaagctggtgacccttgttaggccatgataaaacattgaaattattgcctcaagtaagtagattgacatgacaataggaaagatggcagggaagactcagaatggaagaaaggaattagcagccatactgaactcctcctctcttgtctgggttatttgaggagacatttgagcccagcagaacttcttacaacttcaaattttgcaaggattgccctgctgggtgcagtggctcacacctgtaatcccagcactttgggaggccgaggcaggcagattacttgaggtcaggagtttaagaccagcctgacaaacatggcaaaattccatctctactaaaaatacaaaaaaattagccaggcgtggtggcgtgcacctgtaatcccatctactcaggaggctgaggcaggagaatcacttgaactgggaggtggagattaaatgagcagagttagctacactccagcctgggcaacagagcgagactccatctcaaaaaaataaaaaaataaaaatgtttccaagtccactgaactggactgtcaagatccttctttctctcacttgtaatttgtggactgtaggtccaaagtgataacattacccaggagaaggttaaaggtagagatgagaataagtgtattgcccttcccccaagcccactgtcatagaaaatatattcattttctattgctgtataacaagtggtcacaaagttaggtcttaaaataatgcaaccttattatctcacagttctcatgggttcaggcacatgtcagctgtgtcctctgttcatggttccgcgaggctgaaatcaaggtgatgtctgaggctgcaatctcatctgaggcttggattcctcttccaagcttatgtggttgttggcagttccttgtgaattgaattttggaatagagcaattatgtaatgtgttagccaaactgcaatatttttgagagaatggagagctcttaattattacattgaaataacaggtgtaaataggaactattctggacaaactgctatgtgtggccaccctaatcaacaacagtgaactctgaaagctgtgcagccccagtcatagccaggaaagataatggacaatgaagaaccttccctgggaatgacgcacaaggagttttcctcagagagcggaatcaggggctacctcatgaactaagccataaaaccactaccagagtagggaaaccttgtttcatttctgaattgcaattattctgttcctacgttgtatattaagagtgttagggcacttaacatcttctaatttatagtttgctggacgatgagatgcatttgtttttggtgatgagaattgtgtattcaccctgctatcttggacttggagctgactgtagtgagggatgggtccttggggggggggtaaatatactactctgtgtgtaactagaaggatgtgttcacataaatcaaaggcggtaatctgtggtggaaattggtggttgccccttcaatatttatttttagttatgtgactaagttctggctaatgggataaatgaaagcgttgtagggcaactcctgggatttgccctcagggtcagaacctgtgtactccccttttattctctcttcctccatcctgctctttgaaactctgatgccaccgtcttgagccatcaggtctaggcacaaatggaactgaacactctccctcacactttgaaacacaataccagctcaaatcatgtacctggctttttacctgagaaacaaacttctatcttgtttaagcctctgctattttgtttgttgtcatctgcagcttaacctaatcttaaaacttagatcctcagccaggagcggtggctcatgcctgtaatcccagtacttcgggaggctgaggcgggcggatcatgaggtcaggagttcgagatcagcctggcctggccagcatagtgaaaccacatctctactaaaaatacaaaaaacttagccgggcgtggcagcaggcacctgtaatcccagctacttgggaggctgaggcaaggagaatcgcttgaacctgggaggttgcagtgagcggagattgcgccactgcactccagcccgggcaacagtgcgagacgccgtctcaaaaaaaaaaaaaaaacttaggtgctcactctgcacctcatcctgtctgatatttaaaaaaaaaaaaaaaaatcatatgggcttgaagatctggccaaaccaaatagtgaacattttggaactaataatgagttacagaaaaaccttcctgtaaagtcaacaaaactcagaaatcataaaggaaaagactgacagatttttcctccccacacatttaatatattctggccacagaatatgttaaatattctacagaagaatattcatgggagagccccttagaaatggttgcaaactttttttctctctccatctgctcgcgctctgtctctctctggaatctcgctttgttgccaggctggagtgcagtggcacgatcatagctcactgcagcctcaaattcctgggttcaagtgatcgtcctgcctcagcctcctgagtagctaggactacagactcgcgccaccacacccggctatttttatttttcacagagacagggtctcgccatgttgcccaggctggtctcaaacccctgggttcaagcaatcctccctccctggcctcccaaagtgctgggattgcaggtgtgagccgtcgcaccaggcctgccttttatcttttaattttgtgtttggcatcttttgtgttcagagatgttatcattatgtgtctcgcttagtgtttaaaaattctgcttaaaagggaaaatggtttgtgtttctgagcatgtgtttgagtgggatgagatcctgtttccgaaattaacgacaggaatggacaagactgcagtttccaagaggcgccagcaggtggcactgttcccatttcaagctaatcgcagtataggtagatgccgcgcggagaaacgagtccaggacatcctgtgtcccatcccttggagcatctccgctgctcaaggttcggctattactcagcagaagggcactgctggtctggaaaagaaactttaggaagcggaaatagtgataagttagggtatttattaccggctaacacttgtagaaaagtttgactatattcaagccaagaacacaaggattcttggctgtctttgaagttagggactcatctgcaaatgtgaagcgagctatgatctcttttctcagaaaagtgcattcgtgtctgcacattgccatttttctctctgtcttctctcacaacacgcagtcttcatacaattagagttcatggcccctataatccactatctcttgacctgaataatgttcacagatttcacacaaaaaaactgtttcagacctccactgttaaattattttcagcacaactcgtcttttaacaaactttcctccaactcttcctggttgcagacactattctaggtacttgataaacacagcagtgaattagacagtgaaaagggccttagtcactagagagagagagagaggcactacataagtcaacaacagcaaaaaatgccagatagggataaaggtataaagaaaatagggtaaagtcctctgtaaagagatggcatgaaaaccaagatgagaaggaagcaggagtcagaaaacgcgggggacagtattccccacaaggaaccagcttctgcaaaggccgaggcggcggtgggcttggctgaatcagccagaactcttggcatttctctcaattcctttctttctttcactaaccacattcaattgacagcgagttctgtccattttacttccaaaatacatctcaagtaagtccacttctctctattcctagtgctatcaccctaatacaaactgcctagactgtgggaataatctaacttttttgttcatttgttcggcatctactctcatttccctccaatccatttcctatctagttacagaggagtgattttgatttttatttaattattttatttctttttcttttctttttttttttttttttttttttttttttgaggcagagtctcgctctgttgcccaggctggagtgcagtggtgcaatctcggctcactgcaacctccgcctcacgggttcaagcgattctcctgcttcagcctcccgagtagctgggattacctccatgcaccaccacgccaggctaatttttacaaaatagaggaggtttcgtcacattggccaggctggtctcaaactcctggcctgaagcgatccacccaccttggcctcccaaagtgctgggattacaggcctgagccaccgctctggcctaagagtatctttttataatgcaagtcttgtcgttttcctttcctgcttaaaacccctcacatccttgctaatgaggtctctaaatggccttctcagggtaaaggtagaaagaatggcagataaaacaagacagctggctgatgtggagggtcctgccccttcccccttactcttgtgcactcagttgcactttcagcacctaacagtggcttaaactagggtcaacaatctatgtatggcccatgggccaaattcgcaaagattctcaccttgaccgaactctctagttagaattttttgagctctctttcttttttcttttctttctttctttttttttttttttctatttgagacagagtcttactctgtcgcttaggcatgagtgcagtggcgccatctcggctcactgcagcctccacctactgggttcaagcgattctcctgcctcagtctctcgagcagctgggattacaggcatgtgccaccacgcccagcttaagttttgtattttagtagacatggggtttcaccatgttggccggactggtctcaaacttggtgatccacctgcattggccccccagagtgctgggattacaggcgtgagccactccgcccggcctgagctctttttcagctaggcctcaacctttgggctcccatgtttatctctgtattgtccagttttagcaagaatcctgctaagtcggtttagccagaatcctttacctctgatgttgcctcttagtaatttttccatctgacccgcatcctgctccttggctaaaaatttccacttgtctttgttgtgttcaaagttgagctcaatctctctcccccaccgcaaaaccccattgcagtggcccctacaactgatcccaatggtaagtctatcttaccttctttaacaagtgtcatgaatgacttttcttttaacaaaatccagcctattgcctgttttcatacagctggaaagctaagaacgatttttacatcactacatggttgaataaataacaagatgaataacacctaataaagtgcattaaagtatgccattcactactctaaagttttgcacttgttagctcattttatcattataattctgtgaagtaggtattattactcattttatagatgaactttgaaactgatgctccaaaaattggccgggcgtggtggctcatgcctgtaatcctagcactttgggaggccgaggtgggtggattgcctgagctcaggagttcgaggccagcctggccaacatggtgaaaccctgtctctactaaaaatacaaaaaattagctaggcatggtggggcgtgcctgtaatcccagctactcgggaggctgatgcatgagaattgcttgaacccggcaggcagagattgcagtgagctgagatggtgccattgcactgcagcctgggtgacaagcaagactttgtctcaaaaaaaaaaaaaaggtgaattaagtagtagttcagctggaaagctgggattcaaactcaaggagccttaatttcgagcctattctccccacatgaaaaggtatccagcactatgaagacaggtatgtgagtggcaaaagagagatgtgggcaacagatggtgctgagttcccaagagggaagatcactgtgtctcagagaagcaagggaaagttgtgtaggcaaatgaggccatgtttccaccatgatgcgaggcagcactagccccaattaagtgagtgttctctatctctccccactatctcagtagtgagcctgtattatattcgatgattatattttggatttttccagtaaaaaaaattgtagaaatttgtttttttcttcacatacaggtacatacctaataccttctattttgcctcttggtctgcaaagcctaaaacatttaatatctggccctttacagaaaacatttgcagaaccgtggtttaaactagggtgtaaaccataaagacatttgttgtttatttaagaaatccacactccacaaagcacacatatttcaaaacatcatgttgtacataataaatatatacaattttgtcaatttaaaagttaattttaagaaaagaagttcagatgtaggtgattccaaggttagttcaggaactcaataatggtgccaaagactcaatttccttttatctttctgcgctatcatttgtagcatttctatttgtttgtttgtttgttgtcttctcatggtcacaaaatggcggtgatagctccaagctttgcagctgatagaaaaaaagaagcttggacaatgcatgtatagatcagagacctctcagcaagtgtggggtagaggctgacaacaaaagaccaggatgagacaattacacaatgctgccaaggccagcacaggtcagagacagactcagagatggatgctgtctcttcatttaatggggaaacagcaaagtttcagtttagaattaataccagtggaaaaacaagaggaaaaattctgaatgtggctgagttaatctccatatgaatagaaattaatctggacatgacagaaattaagttaacaataatgaagtttgcagtctcctctaatagagtgtcagctgcaggagggcagatatcttgtctgccttgttcactactgtggcagatacttcattttgagttgcctactcaaaatgctttcttccttcccccttcttccctcctccgtccctctctatcctcccttcctcctttccttccttccttccttctttccttccttcctcctgtcctcccttcctccctccccctttcttttttttttcctaacacatcttgaagtacctttgagatgtcaatatgcctagtcaaagtacacatttgccgtttcctttgaaaatattggtggccaagtgatgagctgtgagcagtagtggggtggggcttcaggaaatgctctctaaaggaaagaagctcttctgacttgctcttccctctgcccttcttcctccctggaatgtggacctgtttcctggagatgcaacagccctcttgcagccctgggaataaaaactgaatgctgtaccagaggtagagcaggccagtggaaggagcctgggtgctctctctttctctctctctatctatctatatatatgtatattatctatatatatctatatatctataacatactataatatatattatctctatatatctatatatctctatataatatatagatatataatatatattctctctctctctctctctctctctatatatatatatatatatatatatttttttttttttttttttttgagacagggactcattctgtcgcccaggctggagtgcagtgacatgatcttggctcactgcagccttgaccttccaggatcaaatgatcctcccatttcagcctcctgagtagctgggactacaggcatgcaccaccacgcctggttaatttttgtatttttttgtagagacagggtttcgccatgttgcccagcctggtctcaaactcctatactcaagcaatccacccacctcagcctcccagagtgttgggactacatgcatgagcccctgtgcctggccagagcctgggctttgagcaactgcaggagccctggactctgagctgtttgttctgtgaggaaaaagaaacctgtttgattaaaccactattatttagcttttctgttacatcagctgaacacaattttaagaaatataaacttgaatctcccgttcctaaaatggtgtcaccatagaaggctctcaatagtcatgtgtagaatgaatgaatgaaatacaaaggcagcactaaaacttagtgacagtagacagtttaagatggtaacaagatgcagcaccacagaactacacgatcccggagagccctccgtgctgcagtctgcactcatggagcatgaatgaacagagtgtggacactgccccaggaattctgtcatatagggcaccctctccaccatcccaaatgcatatgtgtcagtttttcatgattatcacataaatgaaaaaacacaattggaaagttcttggaaaagctcttagaaaactcacagatacccaagaatatccctctctgagatataatgtccagaagggcaatgttgccctgagattttaaaccatgaagaagtgctcacagaactcatggaaggtgggtgtttcctttgaacacagtttattggtagccgtgggtactatttgctaccacctagttgtgtaactttaagagacagaaaaataaaatcccctactcaatgttcagcattccaagtttgaagtcggcacagtttagtgtccagagtggaatttcatattcttctttcaaccataacatacctaccaattagcacaacctaccgatttgctcataaagccccattcatccgcagcataacataaagctgcttttgatggggaaacagcaacatttcagcgtttagaattaatgccagttctaaacatagacttaagaatgtacatttttattaactacccattaaaagcaactctttccatccccacatggcaccacagaactacatgatcccagaaactccttcacaagagggtctcccctatacaagaaacaggttggtatacaaggcaaattaaactatttaccttatgcacttaagataaagatattttctcttaaggaaggattttctttgtaagtgatgaaggtggttgggtgcagtggctcatgcctgcaatcccaacactttgggaggctgaagtgggtggatcacctgaggtcaggagttcgagaccagcctgaccaatatggtgaaaccccgtcctactaaaaatacaaaaattagccaggtgtggtgatgggcatctgtagtcccagctactcgggaggctgagacaggagaattgcttgaacccagcaggcagaggttgcaatgagtcaacattgtgcccctgcactccagcctgggtgacagagcaagactctgtctcaaaaaaggaaaagaaaatgatgaagttgtgtgggaagagcctgactatatcgtaattactgtttattgtctcccttccctcccactctcctgctgccaatatgtcctaagttgttaactccacagcagccaggggtctttgttttgttcaccaaagtagcttctgcacctagaactttgaccagtgctcgacaaatccttcttgatgaatgaactggaccagaaggcagcataactgcatagcgtagagcaaatagcctatcaaagatttttgttggaaatataagaatagattatttcacccacaaaacaagaatacttcttaatataggttatgaaatatatagaattattcctggaaacattttcacaaaaccatcatcctgtagggctcactttcacccatgcttactcctctgctggattaccttttactttatgcttctctttcctctaccgtatccatcttctctgtaagttcaaattcctcccataccacgaagactggcccaagggctatcctctccatataagccttctgcacattaatttctctctctttttgaatccttatgataatttatatttttcttaagactcatcccattatcaatactgctatagttattttggggatatcttaatggtaaataccattgacccacacatctcaaacagcaacaaaataaacaaaacatatgaaacaaaaattttcaagacacttggatatgaggcagtgaaggacagtgattcctgagggttgggaaacaaatgaggtgagccctcctgagacagcgtccaggtcccagtgtgagaagggaagactgagggatagcccagtagaaacgctgaacaggggagacattgtacggagtctgaggagaccaagacagagttcacaggaaagagtttgggatcatttattatggaggccttagaaaactaatatggagagggtgcagtttgaccagtaaaacttgtttctgtgaagagttgctcctcagagggaattttcttcaactctttcttagccaatgtaaaaataaagaccttgaaaataaaatgtaatgtccacagaggacagtgtgtcattttggtgatgcagagttaagtgttcctgcagtgtagaaggatttaactttgcaaattttggatttttttttttaagacagggtctccctttgtcactcaggctgtagttcagtggcatgatcatggctaactgtagcctcacctcctgggctccaaggatcctcccacctcagtctcccaagtagctgggatgataggaatgtgccaccacacctggctaatttttttaattttttatttgtagagataggggtctcattatgtgccccaactggtcttgaactcctgagctcaagtgatcctcccacctcagcttctcaaagtgctgacacgagctactgtacccaccctggaattttttaaatgaattgattgaatatgatggttgttccctgagaattaaggttttttgttgttgttgtttgtttgtttgttttttaccttttagagatgaggacttgctctgttgcccaggctggtcttgaactcctagcctaaggcgatccttctatctcagcctcccaaactgttggggttacaggcgtgagccactatgcccagccaagtcttttttctattatgatttatgatgaacacacaatagaaactttttccttttatcaattccacagtcagatttccccagttgtttccaaaatgtccaatatgtagctttgaataaatgaatacaaatgtcctgtagtgaaaccacgggacacaactcataatgcatgttgcacagtcatttttcaactgtgctgtaatatgaagttgtggttaagaatttatacaatcgggatgagtgaacctttctaagaattgcttttgaagagaatctgggtagcatatatcaaggaacttcaacatgttcttaaccttgagtccacttctgcatatctatcacaataaaatcactctaaatttaaaaagaaaaagttataaatgcaacaatgttcatcatggaattgctgaaaatagcaaaatattagtaatgacaattatggaatggcttaaaaatactatgacataggccgggcgtggtggcttatgcctgtaatcccagcactttgggaggccgaggcgggcggatcacaaggtcaggagatcaagaccatcctggctaacacagtgaaaccccgtctctactaaaaatacaaaaacaaaattagccaggcgtggtggcaggtgcctgtattcccagctacttgggaggctgaggagggagaatggcgtgaacctgggaggcggagcttgcagtgagccgagattgtgccactgcactccagcctgggctacagagtgagattctgtctcaaaaaaaaaataaaaatataaaatataaaataaaataaaaaatagaaatactatgacataaggaataccatgcaatcatcaaatatgatgtttaagaggactatatactaccatggaaaataatcttctaatgataataggtaagagcagcctgtggctgggcacagtggctcacacctataatcccagcactttgggaaactgaggtgggtggatcacctgaggtctggagtttgagaccagcgtggccaacatggtgaaaccccgtctctactaaaaatataaataattaaccaagcgtggtggtgtgtgcctgtagtcccagctactcgggaggctgaagcgggagaacagcatgtacccaggtggcagaggttgcagtgagccgagatcatgccactgtactccagtctgggcgacacagcccgaatctgtcaagaaaaaaaagaaagaaagaaagaaagaaggaaagaaggaaggaaggaaggaaagaaagaaaggaaaagaaagaaagaaagaaagaaagaaagaaagaaagaaagaaagaaagaaagaaagaaagagaaaaagaaagagcagcctgcaaaatctaacttacagaatgagtaaaacaatgttaaaactatgctggaaaaatactaaaacatttgctaacagtagatacttagggtcactgttcttcattatttttatataattttttctattttccaaatgttattgtgattattttgactccagatatgaacaggccaaagccaatttattcacgtgtaatcaccggctttttaaaatttttgattggtatcaatagctataaatacaacttacccttgaacaccccaggcttaaactgtgcagatccacttatacgtggattttcttctgcctctgccacccctgagacaggaagaccaacccctcttttcctcctcctcagcctgctcagtgtgaagacaagaggatgaagacttatgatgatccactttcacttaatgaatggtaaatatattttctcttccttattattttcttaataacatttttcttttctctaacttatgagactatagtatataatacatatacaaaatgtatgttaatcaactgtgtatgttattggcaaagctt

SEQ ID NO: 800 - DNA, 2361 bp, Homo sapiens
aaaggggccccagacccttgctgcggagcgacggagagagactgtgccagtcccagccgccctaccgccgtgggaacgatggcagatgagcagggctgtattgaagagcagggggttgaggattcagcaaatgaagattcagtggatgctaagccagaccggtcctcgtttgtaccgtccctcttcagtaagaagaagaaaaatgtcaccatgcgatccatcaagaccacccgggaccgagtgcctacatatcagtacaacatgaattttgaaaagctgggcaaatgcatcataataaacaacaagaactttgataaagtgacaggtatgggcgttcgaaacggaacagacaaagatgccgaggcgctcttcaagtgcttccgaagcctgggttttgacgtgattgtctataatgactgctcttgtgccaagatgcaagatctgcttaaaaaagcttctgaagaggaccatacaaatgccgcctgcttcgcctgcatcctcttaagccatggagaagaaaatgtaatttatgggaaagatggtgtcacaccaataaaggatttgacagcccactttaggggggatagatgcaaaacccttttagagaaacccaaactcttcttcattcaggcttgccgagggaccgagcttgatgatggcatccaggccgactcggggcccatcaatgacacagatgctaatcctcgatacaagatcccagtggaagctgacttcctcttcgcctattccacggttccaggctattactcgtggaggagcccaggaagaggctcctggtttgtgcaagccctctgctccatcctggaggagcacggaaaagacctggaaatcatgcagatcctcaccagggtgaatgacagagttgccaggcactttgagtctcagtctgatgacccacacttccatgagaagaagcagatcccctgtgtggtctccatgctcaccaaggaactctacttcagtcaatagccatatcaggggtacattctagctgagaagcaatgggtcactcattaatgaatcacatttttttatgctcttgaaatattcagaaattctccaggattttaatttcaggaaaatgtattgattcaacagggaagaaactttctggtgctgtcttttgttctctgaattttcagagactttttttataatgttattcatttggtgactgtgtaactttctcttaagattaattttctctttgtatgtctgttaccttgttaatagacttaatacatgcaacagaagtgacttctggagaaagctcatggctgtgtccactgcaattggtggtaacagtggtagagtcatgtttgcacttggcaaaaagaatcccaatgtttgacaaaacacagccaaggggatatttactgctctttattgcagaatgtgggtattgagtgtgatttgaatgatttttcattggcttagggcagattttcatgcaaaagttctcatatgagttagaggagaaaaagcttaatgattctgatatgtatccatcaggatccagtctggaaaacagaaaccattctaggtgtttcaacagagggagtttaatacaggaaattgacttacatagatgataaaagagaagccaaacagcaagaagctgttaccacacccagggctatgaggataatgggaagaggtttggtttcctgtgtccagtagtgggatcatccagaggagctggaaccatggtgggggctgcctagtgggagttaggaccaccaatggattgtggaaaatggagccatgacaagaacaaaaccactgactgagatggagtgagctgagacagataagagaataccttggtctcacctatcctgccctcacatcttccaccagcaccttactgcccaggcctatctggaagccacctcaccaaggaccttggaagagcaagggacagtgaggcaggagaagaacaagaaatggatgtaagcctggcccataatgtgaacataagtaatcactaatgctcaacaatttatccattcaatcatttattcattgggttgtcagatagtctatgtatgtgtaaaacaatctgttttggctttatgtgcaaaatctgttatagctttaaaatatatctggaactttttagattattccaagccttattttgagtaaatatttgttacttttagttctataagtgaggaagagtttatggcaaagatttttggcactttgttttcaagatggtgttatcttttgaattcttgataaatgactgtttttttctgcctaatagtaactggttaaaaaacaaatgttcatatttattgattaaaaatgtggttgcttaaaaaaaaaaaaaaa

SEQ ID NO: 801 - DNA, 1745 bp, Homo sapiens
gccagcatgagccggagggagggaagtctggacccccagactgattcctcagtctcacttcttccccacttggaggccaagatccgtcagacacacagccttgcgcacctcctcaccaaatacgctgagcagctgctccaggaatatgtgcagctccagggagaccccttcgggctgcccagcttctcgccgccgcggctgccggtggccggcctgagcgccccggctccgagccacgcggggctgccagtgcacgagcggctgcggctggacgcggcggcgctggccgcgctgcccccgctgctggacgcagtgtgtcgccgccaggccgagctgaacccgcgcgcgccgcgcctgctgcgccgcctggaggacgcggcgcgccaggcccgggccctgggcgccgccgtggaggccttgctggccgcgctgggcgccgccaaccgcgggccccgggccgagccccccgccgccaccgcctcagccgcctccgccaccggggtcttccccgccaaggtgctggggctccgcgtttgcggcctctaccgcgagtggctgagccgcaccgagggcgacctgggccagctgctgcccgggggctcggcctgagcgccgcggggcagctcgccccgcctcctcccgctgggttccgtctctccttccgcttctttgtctttctctgccgctgtcggtgtctgtctgtctgctcttagctgtctccattgcctcggccttctttgctttttgtgggggagaggggaggggacgggcagggtctctgtcgcccaggctggggtgcagtggcgcgatcccagcactgcagcctcaacctcctgggctcaagccatccttccgcctcagcttccccagcagctgggactacaggcacgcgccaccacagccggctaattttttatttaattttttgtagagacgaggtttcgccatgttgcccaggctggtcttgaactccggggctcaagcgatcctcccgcttcagcctccctaagtgctgggattgcaggcgtgagccactttcccagcctctctttgctttgcctgccccgttctcttaactcttggaccctcctcgtctgcatggtaactccgtctgagtctaccattttcttgctctccctccttccttgggcctgcctcagttccctttggcctccccctttacccagctcttggggtgtctctgttttttccatccccacttcctgccttctcgtggccctgtgtgagcacatgtgtacatctcagccttatctcaaggaggtgacaccttctctccttgtccccatctggccgtctctctgtgcttccctggccaggggcgtgcctgctggtcctatggggggaaggctactccgcatctcagccaccttcctcaggctcactccacctacatccccagtctgccacaccccatccctttgggcctcagccctgtccctttgatgtcctcctttccttcagcccctctgccctgtccctgcacacctccactgcctcccagcagatctgtggagacaaaacaagcaacaccttaaaagagttttatttctgaaaataaattaattttttgtaaataaaatgtttaaaaataaaaaaaaataaaaaaaaaaataaaaaaaaaaaaaaaaaaaaaaaaaaaaaaaaaaaaaaaaaaaaaaaaaaaaaaaaaaaaaaaaaaaaaaaaaaaaaaaaaaaaaaaaaaaaaaaaaaaaaaaaaaaaaaaa

SEQ ID NO: 802 - DNA, 174832 bp, Homo sapiens
ttctgaatttttatggaaaggaaaaggggccaggcgtggtggctcatgtctgtagtcccagcactttgggaggcccaggcaggtggatcacctgtggtcaggagttcgagaccagcctggccaacatggcgaaaccccgtatctactaaaaataccccagattagctgggcatggtgccgcatgcctgtaatcccagctgcttgggagggtgaggcaggagaatcgcttgaaccagggaggcagaggctagagtgagccgagatcatgccactgcactccagcctgggctacagagcgagaccgtcttaaaaaaaaaaaaaagcaaaaacaagaactaaaacaataaataaagtgggagtaatccctctacatgatgttaatagttaccgtacagctactattgtcaccacaatgtggtactggtggaggaataaacacagtgatcaatgggacaaaacagtgaatgagaaacagatgcgcaggttaggtgtggtggctcacgtctgtaatctcagcactttgggaggttgaggtgggtgaatcatttgagcccaggagtttgagacccgcctggccaacatggcaaaaccccatctctactaaaatacaaaaattagatgagcacggtggtgcacagctgtaatcccagctacttgggaggctgaggcacaagaatcacttgaacctgggaggcagagtttgcagtgaactgagatcgcgccactgcacttcagtctgggtgacagagcgagactctgtctcaattaaaaaaaaagaaaaagaaaaagaaaaaaaagagatgcacagaaatctgctcaactgatttttgacaattgtgaaaaagtaaccccatagagggaaagtaacctttccaaaaatggtgttggaaaaatcacacagccacaggccacagaaagtgaactatgacctaaactttacatcttatgcaaaaaattaagacaaaaaattaacacaaaatgtatcataaacttaaatgtaaagcattgaaccatataactttttttttttttttttgagactgagtcttgctctgttgccaggctggagtgcaatggcgcaatcttggctcactgcaacctctgcctcccgggttcaagcgattttgctgcctcagcctcccgagtagctgggactacaggtgcccaccaccatgcctggctaatttttgtatttttagtagagatgaggtttcaccatgttggccaggatggtcttgatctcctgacctcgtgatccacccacctcggcctcccaaagtgctgggattataggcgtgagccaccgcacccagccttaaaccatataacttttagaaaaaacaccagcgacaaagtgtgcttggagaataattttcagacttacagtaaaagcacaatctataaaagaaaaatggataaattggcctcactgaaataaaaaaaaagttttctctactatagaccctgcaaggaggaaaagacaagctacacatagtaacaacagaataccagcagggagcctcctggtgctagaacagatctgtacatattgtgctgatagtcatgcaattatacacatgggtacatttgcataatgctacacacacacatatacacccacacaaatgagggcatgtaaagcaggaactctgaataagttctgtggattgtgtcaatggcaattttctgttactagagtgacagaaatacactgtatctacagttaaataagacatcaccattgggggaaataggacgaagtataaagcactttcctgtccattttctgggcaagtttccatgaatatataatcatttaagaataaaaatttgattaatacatttgaaaatataggcctaccatctggtttgtgaagacagagtaacattctttcactaacactgttttgatcatgtcgggatccatgatgaccagcatgggctgttgcccctcatacagcctgtgtgggggaaaacagagctgactaaacctcgcttgcctgattctgcagctggaaccacaccaaagaatccagattttgatcctgacattccatcatccatacttgcagttgtgcaatacacagcaaagccagctccaaggtcaattagggtatgacacagagtaagattctcaccacggaagccacttaagccttcatacaacgaagggtgatgtggctcaaacaggaaagagtcattgaaagacaaaagagctcttcaaagagatcatggttagaaatatcagaagcctttgttacatctaggtggtgtatacttgggcattccctataccattctccataatcttttgtatgtttaaaatatttcattataggctgggtgcagtggctcacacttgtaattccagcactttggggaggccgaggtgggtggatcacttgaggtcaggagttcgagacaagcctggccaacatggtgaaaccccatctctactaaaaatacaaaaattagctgggcgtggtggctcacacctgtaatcccagctacttgggaagccagggcaggagaatcacttgaacccgggaggtggaggttgcagtgagccaagatcgcatcactgcactccagcctgggcaatacagcgacactccatctcaaaataaaaaaaaataaaataaacagttatgtaatcctcttcattattttctttaaaaatactgtcttcttttatcttcttgttaaccaaaaagtgacagagactggagccttgattaatagtttcctttagccaaagtttgagaatacatctgggaagaacaccagccacaggagcctctgtgacctgtgctttttctaaagagggttttgggaacttcagaatttaaaggagaaagagcaagcaggagagagaagaaggagagtgtgtaggtagtgaggcaaatggtcacattcttgtgaggctctgagaagtgctcagcaaatctgcattttgcatgtgaaaagagggcatagaggaaaaagtcagttatatatttctattgtgataaagaaatctccattttacataagataatgcaaacatatgaaaagagagaatagaggcaaagtcgattacgcattcaacttggattgggtggagggataatttcttggtcttgtccttgtcctgtgcctgccaaggtaaactggaaattgacattgtcagggtaagtgagattcaacagaacttggttttaagggctggttcatggggggaaggaggatatgtatactaaaagatttagggactcataaggaacgtccttgtgagaaacttacgagggacgccatctggggagatatgtggccttctatcattttgggaatctggctttcttatgaggttatgacacagcattgtgaaattacagctatatgatttgaactaaaggaaggcagtattgcatgactcagtttccaaccataacttttcattttggcatagtgagtttggtcagatttttgctcttaatttagtcaagataactttttttttcataaaggaccacagtatgttttattacgtaaaaagtgttaaaacttttgtatgaaaagataccgtaaacaaagttaaaagacaggaaagagactaagagaagatatttgtacaagagttaatatagagaatctataaaacttctataaatgaaggatttacttgataagtgagaaaaggatattaataagcaattcataggaaatgaagtctgaattatcagtaatatgaatgagtaattgacaatgataagcatgggaagttcctcagtattggtagaagtcaggaaaatgcaaactaaaaagatgccatttttattaaaatggcaaaaattacatttaaaagcatagattggcaaagatggagggaaaggatacttttttatatagctagggagactgtaaattaacaagtttcctttgcagagttagtttggcagaaaatgggcatagaaaaagaagataacttttaaggatagacatgaccattttataagtcctttaaaaaatttgatcttttaattaattgtttagaataaaaggtcactaaaattttaaatttagaagtcttaattcaaaggctcccactattttgtcattgacaattagaatttctaatgaagtatttattataacagcacatagagagagagaggctgggaaggtggccttgttatgcaaagaaaacctcgtaggtagtagccctcagagtatgtgtcagatccttttctactcttccctagatttagacaagggaagttctggtaaggccacattaaaatgtgtcaaagttgggaggctgaggtggcaggatcactgggaggcagaggctacagtgagccaagatggtgccactgcaccaacctgggtaacagagtgagactccatctcaattaaaaaaaatgtgtaggccgggtgcagtggctcatgcctgtaataccagcactttgggaggccaaggcgggcagatcacctgaggtcaggagtttgagaccagctggcaaacatggggaaaccctgtctctactaaaaatacaaaaattagctgggcatggtagtgagtgcctataatcccagctactcaggaggctgaggcaggggaattgcttgaccctgggaggtggaagttttagtaagccgagatcaccccattgcactccagcctgggtgacaagagcaagactccatctcaaaaaaagaaaagtgtcaaagaaatatattttgagttgcatattgatttctcttaactggctggggtttctagaggggaaaattgacattttgtagctgtgggcattccagtaaacattagagggggccacgaattggtaaaacttagtggaaggtagattgaaactcaaaacagaaagttatcacacaatttacatagggtcaagatctccaagcataaggggaagttatagctagctgacaataaaccttgaccctcagctaccaaattccaaaatgaaaagccacatcggctccttatgtggagacggatctcaagctaaaaactgttcatcattatggaagcagaaaactcaccttccttgttggaagtaagtaaaaactcccagaaaggagctctatggcagaagaaaattcaggtctcaagcaacattttatgggagatcaaggatctctagaaggagaagctcccagacctcagcacatgagccaattggttagagtgataaaaagctctagctggttctatcacactgatgggaaaatttctgcaggctgagggccaaactgccctcagtgaatcccattgtggttaccaaggtgttaaccaaaaagtgactgaggcaggtgtcttgattgatagaggtttattgagtcaaagcttgaggggacacctggaaacacatgagccacaggggtagctgcgacctgtgtttttccaaagagggttttgggaacttccgaatttaaagaggaaagaaccagcaggaaggaaaaaaggggggaaagagtaggcagtgtggcaaatgattacatttgtgtaaggcaccaattagctctcatcgaacctgcactttacatgtgaaaagacagagtagaggaaaaaatcaattatgcattcatgttgtactcagaaaatctacattttacatgagatatacatgtgaaaagaaagagtagaggaaaagtcagttacatattcatctcaaggtaggtggagggatgatttctggtcttgtccttattctgtacctgtgataagctggtaatttacatgatcaaggtgtgagtcaacagaactcaatgacagggctggtttatagggcagatgtatagaattccatgtgagcaacttgtgagggaaaccatccagaaagatatgtagccttctattgatataggagccagaaaaaaattatttaggcagatagtgagggcaaaggggtcctcagcaaagcttcccttttaacaaaaagcagccccccaaatcatttcttttctaacaaagagcagcctgaaaaaatcaagctgcagacatcgataagcaagctggaagcttgcacgggtaaatgctggcagctgtgccaatagaaaagggctaccttggaagctggttatgttcaacatggaggccccatcttcccttatctttgtcaccccatttacagtaaaaaaagcaggcaacatggtgccagccaggaagagaaccatctgcataataaaagattagggtggggcagccaacttcttcacatgttatgcaaacagtacacctagtcctaaccagttttttatgtgctatgcaaatgacacacctggtccaaccaatctttcatgccctatgtaaatcagacactgcctcctcaagctcatctataaaacctcctgcactttaccgcaggtcagaagacccactgggggccccctctctcggcaggagagagcttttctctttctttcacctatccaacctctgctcttaaccttattctttgtgcgtccactatagggagaccccctatatctgtgggacaacaaacctcgggtattaccccagacgagtgatgccacattgctattgttgtgggaatgtggcttatgtatgaagctattacccagggttgtgaaattacagctatctgtctggggaaaaaaggaaggcagtaaggtatgacttaattctcaagctcgattttccctttgtcatagtgagtttagggtctcaaagattttatttttgttcacatactgaatatgcatggagtttcctatgacacgcatattccccttgcaatgctcaattcccagatcatctttttcttttagatagcctctctctgtttgttacttaggttgacaatagcattatccaaacaaaatctgggctgagattgttctctctgcagtaaaataactcagcatagcaacagctctatccaatgcaagtttccagaatactcacccccacatttctccgtatttttcattacattctctgtcaaaattccaaagaccctggcagaagaaacaaaatacaattcaagtattatttcgaatgtactgaacgctacatttaaccagggcaaaaaagtcaaatccaatgacttgctaccattaggcttgctaccatttactggcagttagagggaatcttttttttttcctttttttctgctgcccaggctggagtgcaatggtgcgatcttggctcattgcaacctctgccttctgggttcaagctcttctcctgcctcagcctcccaagtagctgggattatgggggcccgccaccacacccagctaatttttgtatatttagtagaaatagggtttcaccatgttggcaaagctggtctcgaactcctgaccttaggtgatcctcctgcttcagcctcccaaagtgctgggattacaggcgtgagccaccacgcccagctgggaatcttattcagagacctcttaaggaaaaggagagaaaatacagaagatatttgaaatggagaatttaaagtcacttttaaattttctctaactagtgtagatattgaatgacttacttttgtctatgaacactaagcaactcattgtctttctgatgtgttttcatttctgcatatgttgtctctgcaatctcataaacccctgaattatcaccaccatgggaacatgaagaaaccgaggctgacggaaagtgagtgagtgtctcaagggaatgtgcaatcttttatctccttgttcagcatccttttcatttatctcatgtattctctctagaattctagctgaattagaaagtcaaaaacatcagggaccacttttagtctagcagatttaaataaaagtccaaggcattttgttgagcgagaaaatgagtgagtgggcaaatgacagagtggactcactttccagttttccagcttaacacataataagtgtgggaaatgccacctctagatgtcagacacagcacattacaatactcactcagagttttcacttctgacacttaaaaacaaactttcctgcttccttgtttcagttttgatgttctaactaggcaacatatagcccaggacatgtggatttactaaaggatcgatctgggaaatatgaagagaaaattattgctttttcggggggtaaaaaaggatgaaattcttaagtggtaattttgcaatgaaggcctcagttgggagaattagaatctgaaaaacaagcctcaggtctgtaagacagaaaacctgagtcagagagcaacctgtacacaggctttcttactggccatgtggacacgcacttgtgactttccatcatggccccaggcccttggtggagcatcagaccagggtagccacaaggctcagtcaaaattcgaagactatgagacacatattacctcctgtttagataattaaattttgaataagtttgtcaaattatcccctttctagttattttgttaagtaattttgcctttcttttaaaaaaaaacagaactcattttgtggttaaatatctgaagttgatggacagcctccatattgtcttcattataagcactccctgctcaggctcactcatagggtgctgcctttgaagaaaagcagcaggaaagcagaaccttcttgttcttcctctcaaatctgtaaaatacatcctggggagaagaagctggagcacaactgtggaactacctgcagggaatttaacagttcttgagagaattcaagtatgtgcaaattatccagcggtaaatagctgcctagtgaactgaattttctttttctttttttcttttctttttttttttttttttgagacacagtctcgctctttcacccaagccagagtgcagtggcgctatctcggctcactgcaagctccgcctcccgggttcacgccattctcctgcctcagcctcccgagtagctgggactacaggcgcccgccactgcgcccggctaattttttttttttttttttttgtatttttagtagagacagggtttcaccgtgttagccaggatggtctcgatctcctgacctcgtgatccgcccgtctcggcctcccaaagtgctgggattacaggcgtgagccaccgcgcccagccaatgaactgaattttcaaagctctacaggaggaaggaaacaaaagcttactaaagctcttggtgaaaacaggaaagtttgaatgtggtacatgatgctaatgagcgctactggggctcccatttccccatttctgcttttctcttaatactaaggacaactgtagcttctcaaaaatctgcacagggcaaaaggaaagtcctctttatggttcgcaaagtctgaacatcaagtcctgaacatcgagtgctgatcccccagatatctgtgccgtgcaactgaggcaaacccaaaccccctgaccattaagatgagagtcctggtataaacctggccctgctctgggtggagcatacacaccatttctgaaagtgtaaaacattggaaattcctcctgaggaggagcatttttactgataggactaagcttgggtttgcatcgataagaagcaaaagagggagctcaaataacacttaccctaaggtagaacaaaatagttcccagaaaaggcagaggggttggcccaggaattcccagcttcttaaaaagtttatgtgaatgggtcccataactataaaataaaagagaaagccaggttacagaaattgtaactttatagataaggggttggccagacattacctcaggaactggaatgttcaagggagggaggtaacatggaggcaataaataacaacagaaactctgatggcaataattacattttatagcaggattttaaggaatcagagagaccaatggggttcaggaggatatttattaattatttaggtacactgggccagtcagattaacatccaaaggactgagcctcactttcttccaagcctgacttttcgggtgctcctgactctgcttcctgccttattctgaccaaagacagatatactggcacacatggggatggacattccctttcctcaggtggggcctgaataattgatttcggctgatctttggggattcctgcaagctctgctctagttacatctcggaagctgactagtctatgcacagccgaagctaagagtaccatctctggataagtaaatgtggatacaatttacaagcctagttataattctgtcagtactgattgttctgttgttacgttattactgcaaatgctgcaaatgtctatgcccagaggaaggtttgccattcccacgtgtagtgtaagcatgtttctattacatacgctaatgttgttaccatttctgcctacactaaaaggggagaaatctctagaaggatgcccacactgtgtacacactacctgggtaaggaataccatagtcaaaactctactgtaccataactactatgaatgtgcaggaaccaagttagaaacctgcacatacaaccagaccacctattcagtctgtgacccaggaaataatcagctatatgtatgttatgaccctaagctctcaccctatgaattctggcttgaggtacatgttaaatcagagggagaaaaagaaggagagcttatagctcaaaccaaagaagcccttcccctctataacaggcctatttccttgtattttgatgcctaccataccgcatatgttcataatcctaaaaaaccagaagcagtctgcaatggtttgacacgagaggcttatcagcagcagtcctaaacatctgtacagagaatgacaaatcggatgcccagactgtaacattaagtggtctacactgacacaacaccaacacctatattcagggaagactgttctgctaagtagtatgtcaaccaaaccagatcgtaagacaaagacatgcaatcctttaaattttactatcttaaagccagagctacctttttggtctacaggacagacagcactattaagagttgataggcaaggagcaggccttagaattccactactgattgtcaaaaagactagaagaactcagatgtgtccaaccccacaattctgggttcataagtcattctataagcattttgatcagccggtgcccgagcttcccccatcaaccaaaaacttatttgctcaactagctgaaaacatagctggcagcttaggaatttcctcatgctatgtatgtggaggaactaatatgggggaccagtggccatgggaggcaaaggaattaatgccacaaaataacttcacttcgcttaaccctaccagtgaaccaacagcctcaaccagtgtttggttgttaaaaacctccataattggaaagtactgtattgcccaatgaggaaaggctttcacaggggcagtaggagaaacaatctgcctagggcaacagtattatgatgagactaaaaacaaaactctattgaagaaatgcccagaacaactcctacttacaagatcaaaaccctttccctccactgtctattctaagccgcacttggcatcggctagaggctccaaatgcttagaaagcaccctctggcctatattggacctgtggagcacaggcatatcagctgctgactaaatggacaggggaatgtgtgttagaaacaatcaagccatccttctttctaattcctctaaagccaggggaactcttaggatatccagtttatgatgaaaataaaagaactagaagaggcataatcacaaaaataaacacaaatatcaaaaaagatgtggacataggagactggaaagataacaaatggcctcctgaaagaatcattaaatactataggccagctacctaggtgcaagaaaggtcatgggggtaccgtacccccatctatatgctcaactgcatcataaggttgcgggcagtccttgaaattataaccaataaaacatcaagggcactagatttattggcaatacaagcaacacaaatgagaaatgctatatatcaaaataggctggctttagatttcctcttagcctcagaaggaagagtatgtgaaaaatttaatttaaccaattgttgcttagaaatcgatgataatggcctagctgtcatgaaaatcacagctagaatgtgcaagatggcacatgttctagttcagacttggtccaggtggtccctggattccttatttggaggatggttgtcagcctttggagaattcaaaaccctcattagtgagttcttgcttatttttggcatttgcctcatcctcccttgccttttacccctgtttattaggagtattcagtcaactatagaggcaatagtagcctgacacgctaccgcacagttgtggcattaaccagatatcagctgctgccggtagaagaaaaagctcagctccgcgaggaggtggcaaatagtggtgctttctattaacacttctgttgtaaaaagcaccaaaggggacaatggaacaggaattaaaagaaattaaagagtgcgtaagcagaaactgagttgtatatgaaaaaaacccaacttcccctgaaaaagagaaagagctggagtcttttaaaaactaactgcctgtttttctgaggctagtgagccttatctctcctcccttcccaggcattgcaaagaccctgtttccctagctgtgcagctgcaaggtcactagacagataaactcaagtcacaaaacgtgtttttccttgaaatgtaagaaatgatgtaatgcatttctcaattgaataactgtgtttgtttcttacttctctagtatgcttccctctccacagatctcccccctcccacgaaatgcttaaaaggtaactaaactctttgttcagagctcagtcctctggatgttaatccgactgggctggtgcacctaaataattaataaatatcctcctgaaccccatcagtctctctgattccttaaaatcccactacatttcaatcctcatcttttttgctgcctcctctgtgagaccccaaaaagtcacaatgattaactaaaagcagctgaagtctgcatgatcccagtgctagagtgaatgcttaataaatgttcccaaatttgagtgcccttaagaggttcagactggaattcttccagggcatttcattcacgtatgtctatttagttaattgattctttcctgatttggaaattctctttctaggtgtattagtccattttcacactgctataaagaactacctgagactgggtaatttataaagaaaagaggcttaattgactcacagttctccatggctggggaggcctcaggaaacttaaaatcatggtggaaggtgaaggggaagcaaagcatgtattacatggaggcaggagagagagaaagacagagagagagagaagaggtgtcacactttttttttcttgttttgttgttttgtttttttttctattattattatactttaagttttagggtacatgtgcacaacgtgcaggtttgttacatatgtatacatgtgccatgttggtgtgctgcacccattaactcatcatttagcattaggtatatctcctaatgctatccctcccccctccccccaccccacaacagtccccggtgtgtgatgttccccttcctgtgtccatgtgttctcattgttcaattcccacctatgagtgagaacatgcggtgtttggtcgaggtgccacacttttaaaaccatcagatcttgtgagaattcattcactatcatgagaacagcatgggtgaaaacacccctatgatccaattcctcccaccaggtcccttccttgacacatagggataacaattcaagatgagatttggctggggacacagagccaaaccatatcactaggtgaggttttttttttttatcttttgaactaataatgagtttgtgcatcactacatccattgaattacagagggttactgaggccctttgctgacaccttctttcctgttttctcagaggtgtttatgcttttccttccctctaaacactgaccttgttttaggatctggccatccttaaacattcctgcacagaggagctctggaagaatcatagtgttcttatttctatggaatgacaaccatattcaaggcttccactggcttcatagaaatgtgagcaccttccagctacacccaaatctctgtggtcagatgatttgattgatataaactacagtaaatgtgattgacctatatgttctctgaatggcactatgcagaggaaccaatgactaaagaataaatttcaaggccattcctcctcttgtgcaatctggccctccaactggtgatccttacttgataagcacaatgccagtcatgctcactttttttttttctcaaaatgatcagtcacacagagtcagtttactgcttctgtacatcaactatcctgcaggaaaacccattaagtctggtgctccttatggcaggcctgcctgcaactcatctttgatgggttatgtgtgaactccatcaattgcaggttctggatccttgcagaacttcccactctggtgttactgagggatggaagactggaggaaaaagagaggctgcatcccgccgatgtaaccatgcaactgctggtgccacaaagtaggccctataagggtaagttaggaaagtgtggctgaaaattatggtatgcataaatagttttaaatgccccttatgtgctttcagctgaaagagaggtcttccaaaattcaggaacatttctgttgatagaaaagtttcactgtgctacatagcataagtaaccataaaatattccagacagttgaattagaaacttgatttctcttctttataggttagcttttcttagatcctaaatattcagtacaaataaataaatcttataaaatgtgataaagctgaaaaattgcatgaagagaatgtgtttgaaggaccccacagtggcaccctggccaggcccagctgttagcttggttccctctttggggatcttttcctactcacacatcgaaaataacctcttgggtttccagttgtttataatccattatctgcccatgctaaattctggttgttagtctaggtagatcaaaactcatagtcaatcagaaagcatccccaggattgaatgatgtcagtaaacactcttagtaacagaaattggaagttgaatgaagaggaggtggataatgtttatttacttcttcaacggatctgtgtaacatctgtagggtcaagagaacattcctctatggaggtttgatatttgagtctgagaaatgaactaacagtagatcaattaataggagataatccttataaatttatctcatgaatatgcatgggagccttgaaagatatgatactcaaagaatggcctgatgattgaagcttaaatagcattctgagctataaaaatgtagtatcttctgatggggagtgggtgacacaagacatgagagagtgagggaagaaaaagcatgataaacaaaagtcatcttattataatgtctgtcaggcatcagtgctccaaagaacaagtattatcaaccttagtctccctttctgtgagctaatattatttttttcttttttttttcttttagactaagttttgctcttgttgttcaggctagagtgcaatggcgcaatcttggctcactgcaacctctgcctccagggttcaggcgattctcctgcctcagcctcccgagtagctgggattgcaggcacctgccaccacacccagctaatttttgtatatttagtagagacagggtttcatcatgttgaccaggctggtcttgaacttctgacctcacgtgatccacccacctcggctttccaaagtgctggaattacaggtatgagccaccatgcctggccctgctaagattctttttcatgagattatagggagggggctcaagaccattgcttttttttaggaggatcttcctttaggtatgagaacttcagagaaagccccttcctatattttgggagaaatagcagggttgggagacaggagaacataagagttagcttggttctgaagactttctgagacctttcaatttcctttggttcaaagtcctcaacatgcttaagtgccatattttggggtttcatttttggagccccaactttcccctgtcataaacttccctagaaaatgtacatactaaagctgagttgatgcttgtggagaggacaattgaattggtagctgagtcgcaaggaatcacattaaaccagtataaaccagtctcacattcctagcaatgtcaatccagttaaacagctgtgcctcatttcaggaggtgatgttgcaggtctgctgtcatgaaagataggtctgtatatggtgcagttaaacaggtacttaataagaggtcattctaccaaagcaaaaggagaccaaaagttaatcatttagcagactagtttctgagttcacagggcagccagacaaaaagatttctacatgttggttttgaaacagctccagttggagtagaggtaggcaatggtgatctgacagattttttttctctcctatagctccttagggccagatctgaaagactttaagttgttgcaatttctctggagtctgctctatcacaaagaattctgcaaaaatcacatttcctgcctttgtggaccaaaccaatgtatttcttaaatgtatttgatatctcatgcctccctaaaagaataaaaccaagctgcaccctgaccaccttgggtacatgttcttaagacctcctgaaggctgtgtcatgggccatggtcactcatatttggcccagaataaatctcttcaagtattgtacagagtttggctctttttgttggcagcatgtattaactcattctctattacaattcccctgtcttgatgaatgggctctgttgaggcagggggcaaggtgaatctcttgggtggttacagtgaaaatccatacaaaattttacatgcatatgtgctggaggcccacaatatatgagactaaaataaggactgaatgagtaaagcttaaatagcattgtaagctaaaaagtagggagtggcttctgatagggagtttctgacacaagttatgggaaggtgaagggagaaaacacatgatgaacaaaggttattttattgtggagataaagtctctcaggtagcagtgctccaaagaataagtattatcaaactttttctcttttcctgtgaattagttttctgattgatgagattatttggagaggctcaagacaattgcattctttttggaagatcttcccttagtcagataagagaacttcagagcaaccctgcacttcaggagggaaagaatgggggatgggtagacagaagagggtcagagattctgaagacatttgtgaagtctttcagtcttctttagttcaaactactcagtatgacaaagttttatttttttttttgagacggagtcttgctctgtcacccaggctggaatgcagtggtgcaatctccgctcactgaaacctctgcctcctgggttcaagcgattctcctgcctcagcctcccaagtagctgggattacaggtgtgtgccaccatgcctgactaatttttgtatttttagtagagaaggggtttcaccatgttggtctggctggtcttgaactcctgaccttgtgattggcctgcctccacctcccaagtgctgagattacaggtgtgagccaccgcacccagactaaattttacattttcaaatgttgtattaggagtcctaacatattaataatattttatgtgttcacagtatttggcacttaggtaacttcccctccgttatctcttttatcttcaaaacaaataagaaaaagatgggcccaattagcacttcaggtcttagagttaagagcaaacatgcctgcatagttactcacatatagaggagtaccaggctggtagccacaagaacccatgtttccatggcaaagtttggaatgagatccatcaccagttttctttttcagctctgtcttctgagtttttctttcagctgtgtgctgctctttgctgggctgtgcatatagagctttgtttctctgcccagaggtgatttagttaatgttaacagcgatatttatgtgctggagaaggaggtgggtctacagcggcagccagtagaaaagccacttatgctactcctcatatggagggatttgggtacccttttcaaattgacaattggcaaataattatggctgtccttattttggcctcctttgatttcctattctgtgaacaatcagtaaacaaatcagtcactgctattggtaagcccaaaggttatagattctcaggaacctaaagaaaaatacttctgcaagaacatctgcccagcaactgcctgtccaacctcaaactgatgtcagtcttgttattgatctttatagccaaggataatcattccaaaacaaatatgtaatccttctcattatttttttaaactttgtcttactttacctacctgaataagcacatagtttaccttggcacgcatattcccattgcaatgctttattcccaaataaaaataattctttttagaaagcctatctctgtttgttatctaggttgccaaatcatgcctccaggtaaacagacaagaaggactccctgtgcctcaaaagcaaaaacaaacccaagaggccatggcaggtttaggtgatggtcatgttctctgtgttcttagtaagtgttgcaaaacctatttttctgtagccaagtcaaataacattttctgaaaaaatctgtacctgggaattttccaactgctcaccaacagatcatgtggtaagaactaactgaccacctaggaacagccaattaagagacatgtgacttggggcttaaaggctgtctaatcaagactcttttcttcactcctctgactcctctatcctgctctgtggtttttgactttatagctctccacctccgaggctgcatctcctcaatctgcagactgtgttttatagaaaatgaagctctccctctgtcctccacagatcccacaatctttactcatatttcctggtgatgaggaagggatcaaaattggctctcaagatcctctcccttgtcatctggactaatcaatgcattggcaccagcaagagtcctctaagctcagttatcttcctggcctggctgttttgtggaaaaatcagtaaatcctcttacatccaagatctcacatttaggatgaggtcttgaggtctttatttttttcagggaacctgcccttctggctctatggctacccacttgtggggtatgcttgcacttggaggggcatgcccatgtttcttggggtgcattcatgctgcatcaagcaagttcatgcctcacaggatactccatgcttcagtgttgcaaggactatcgcattttatttgcccttgaagggaccccttcctaaggtgagggctatgcataacctaggtcctaaggccatggtctctaaggcctgccatcgggtaattcggtggctctgtctctgatcaatcactatcaggtactctggcagtttttcaagtttaaaatttaaaggtaaaggctcgacagaaatggatgtgagagatacacctaaattgaactccgaagcatgcaatgaggataagaggagtctggacttctcaaagacagtaagaggctttctttcaatctgcatttttgaaagtttcaaacacaattgggactttggctgtgttttactaggagactaacctgaagagttaacccatgtctcagaaaatctgaaaaacttgaagaccctaaaatggagagtcccatatcttcctgctgctgcacttgcattctacctccacttttccctttttaccatcactgtctttgtctggaacattgcagggacctggcaacttggtaccagcaggggccattgagcccctggctccttcatgatgattgaaaactgggtgggtctctcatgagttttggacttcccacttgattgacagctgtcagttttgttcagctagttgttcttacccctggataaaagggggtgaaagaaagtctctttctttgagacttactgtttctcaagaagggggaatcactctgtatttctcctccataaacatatgaatgaatatgtatgctatttctcccattaatctcctttgtgggtgattttttttgttgttaacaaaccttcagaggagaaaggacaaacatttttcttggcctcagcagttctgtccctatgagcaggataccaaagccactctgttctttcagaagcctcagtgaagggagcccaagcacttgtaagtcagcagaaaagtaagaatttctttttttttctttttctttttttgacagagtctcattttattacccaggctggaatgtagtggtgtgatcttggctcactgcaatctccgcctcctgggctcaagtgatccttctatctcagtctcccaagtagctgggactacaggcacatgcctccatgtctggctgagaaaagtaagaatttctttccagacaagctcctggcctttctttctgggagatccacttgggcagatgttaagaattgctctttgtctcctctgcaaaatcttaataaataggagaaaaggatttgtgttactagtgctgggtgcagcaactctagggtactctctagtactttctcttatgaatactcacatcgtttgatccccttttcctctagaaatagtcttttcctttgttcctgtatttctgtgctgttctgtcataaaaggggctacaggagtgtagaacatgggcctgaaacccctataagcccacttgttggagctggctctgcggactgagcagctggtgcttctgaagaacacacctgttgttctacacatgtccagctctcgggggagtttctcttaagaagccccatccctatgggtcttttgcttccctaacccttgtgacttggttagtcctgggaaagtccaatccccggagaacctacccagtgtcacatatcaacaggcctgaacttactggttttggtgtcactcaaaagggtaccttcagttttaaaaaatcaaagcctaaaatgtttataaaggatagatcctcaggtaaaatagactgacttctttttcagaattattcatagtacagccaaacattaaaatgctttctttggctaggtaaggaggctcacgcctgtaatcccagcactttgggaggctgaggcaggtgactcacttgaggccgggagttcaatatcagcctggccaacatgatgaaaccccatgtctattaaaaatacaaacattagctgggcatggtagcgcatgcctgtaataccagctactggggtggctgaggtgatccagaggatcacctgagcccgagaggcagaggttgcagtgagctgacatcacaccactgcactccagcctgggagacagagatagactgtttcaaaaaagagggaaaaaaagctttcatcactctatttaagagctccatcctgaattcagtaatctaatcaagaaatttccataaaaagataagaaaattatggagaagacatcacaataatgttataggatccttgaggtgttgcttttatggcctaaaacctctggccagtggcacctttgcccaagttttgctcggacttgctgggcttcttccacccacttgggttggcaagctgcacacagtccacactaccagcctggatcccatgcctgccaagggtgagttaggaatggagccatgaggggtgtgtgaatgaatgtggggtcaggccactgcacagtcagacactacagccgctgcagtgacaggcagctccaggtgccggcacaggcactggctctctgtgaggctgtggctggaccaggtgcactgcaagcagtttccccagccagcactggggaatgcagtggttactgcaaacttggagacaccaggcactgcaggataccaaagagtcacaaccctgttttggggagcttccaggtctgggctccctgaaggactgtggctcttctctccttctctttgcctgcaacgtggtgagcaaggggcatgtttcagccctgtttatgttatagctgttttacctctgccattcagtgggtcctgagttcttgtccttcgaccaggaagaatgaggtatgcagacaggtggagggaaagcaagatgaagaggagcattattgagcaatagaacagctcacaggagacccacaaagggtagctactttccacagtcagggtgtcccgatcagtgttcagctcctggcagagaagacaccctgggttgggaggctcctctcttcaggtaggtcatcctgtcatctctgcagctctcagcagagagggggttttggagtgggttgctcctctctgcagctggtagtctgcatgtctctgcgggtctctgaggctctcagcagagaggaggccctagagtgggtagcccctctctgctgctggttgtctaaatgtctcttgctatcagcagagagggtagctcatttctgcagctggtccacctgatgtctgctcagctctagcagagcctggggcttttatgggccctagaggggaggaagtgtgcactgatcggtccttgggcagccatggaagggctggaaaaagaatcacaacttcccagtctggtcaatgggattggcagcccagccaccagccttcaggccctccctgacctgaaggtggggcctcactggggacccacctacttctacctgggaatctgtctgcctcctgcttccattcttggcaccagggctcagcctcactttgctatgagattggagagggtgctgacagcagggagaagccagggagcaggagcaggcactttggagcctgtgagggtaggggggccttcctgggcccccaagagtgcagggatgcctgagtctgcagctggtgggtggctgcagctgtgcagggtaggggggatgggggtgaggaaaggtggggtgggttgtaggggtgggtgagggaggatttctgcctgctccatggagctggaggcctgggtctgcagctgtggtttgggtggctgcagcagcacccagggagctcctgccccaacttgggcagggctccatggagtgtgcagccccgcccacctccctgctgcagccagcgtaatggcagtggcaggctgtctggagcagccactgccatcaataacctttgtacacttgttcccagttatagaatttatgcaaatagatctataaaaataaatgtactgaccactttaggacaaatattagagagaccacaagaaactttgcaggacaaccagagtctctaaatttcttagcttaaatggttttaacaaaatgctcaagttttatacagctaattgctacaagtctgtaactaaaacctagattatagtagctcagtgcatataacttacagataagtctattttgtaaccttgcctttcatgacaaaagtcttttgacttttgttttttggctcttatattacttaaaaaagattttaaggattgatgaatgccttcccacctctattcctgtctggcctagaacatataaatcagcgattagtcttttggctttaagtcctttggccataagagccccatggagggacagggtggacttggggcagacagccacaccattacagcaatgatgagaccaaataaaagtctgccattgatgttggctctggaaaatcttggcccaaataaaggagaatgtaaaccaaaaacaaaatcccaagccccctccaccaaataaacagacccaccgttggctaagtggaccccagaggaacctgaaaaactgaattccagggcatgaggaaaagggaggtccagcatgcctcattataccccctccattgctcactgtcattagaccttctttcctaaaggtgaaaaagaaagcagccccttcaaaagattccacaccaatattgtcagttatgagcttatccttccaggtacagggtaaggataagatgagattaatccttccctcacccttccctgagatatctacttcctctattactttttctttaaatgttcaccttatcatatgacaaggcactaactaaagtctcacaagtatgtaatcactcatctcataacacccccccaccattttaaaggaaaatgtataaatattaaatctctgagaacctctttggaaaaaaaccagccacagatgcatgtgtgacttacatttttcctgggcatgcacttaagctggctcaataatcctcggtgattgagacttatgcttcagtcactcattttggtgaaggttgagatgacaaaagccctcatggacttgagcctcttaagactaactcccctaagagctggcatggtcagacaaagagaatgctactttctacttcatgtcatgggtccctggcctttttgactagcagccagatgggaaccaaaaatcagacccccaggtaacagagaccagagagagatgttctcacttggcaacaaagccaatttctcaggacatacaaatagacaaaaggaagatctcatttgatttttttctgagagatacactgcaaagtttgcctaaacagatgctggtctgctgagaaatatgaagtcaccagtctgcttggtgggcttaaatgacaggcttataaaaagaccttatgcccatgttctgccctacaattctcctctttctgacaaatgacaacaagacaaaggaaagcaaagaccatctctgaaggggcagggaccagaaatgcagaatactcatagcaaaaataaaaacactagatgtataccaagaacaagtttacaaaaaggttttctactactaatctaagtttggaaagaaacatgagactagtagtgatattaccacttgttcaacctggttccacaagcagagatccaggagacagactgggtaaggattcctacctttctccagcttcatcaggtctcagggtctctcaactgtagcttcagaagctgcggagtgactttatctcctggttgtctcaccaaaactgtaggaggtggggagagaaaacttcagttcctctggaggcttaatgtttgagtctgagaacctgacaatggattgattaacagcacctgtcatctcagttactcgggaggctgaggcgggaggatgatttgagccctcaggaggctgaggtgggaggatgatttgagcccagttgttctaggctgcagtgagctatgattgcatcactgcactccagcctgggtcacagagccagactctgtctcaaaaaaaatgcatacacatttatgaaatgcatacacactggagactcacaatatataagactaaataatgaccaggtggttgaagcttaaatagcattgtgacttactaaaaatttaaagacttctggtggggagttggtgacacaagctatggaaggataggggagaaaatgcatgatgaacaaaggttattttattatggagataaagtgtgtcaggtagcagtgctccaaagaataagtattatcaactttctacttctttcctgtaagttaatattctgtttgttgatattatttggaggtgctaaagacaattgcattctttctggcaggtctttccttagtcagataaaggaacttcagagaaagcccctctctgcacttttggagggaaagtatgggaggcaggagaaggtcagagagaccttagttctgaggccatttctgagatcctccagtcccctttagttcaaagtactcagcttgccacagtgtcctattttcaagtgttttcttctgagccccaacagatcagtaatgataatttatgtttgtagcattcaatgcttaagcaacttcccctccattatgtctttcatcttcaaaacaaataagaaaaataggcctgattagcactaaaagtctaaagttacagagcagatggcctggacagttattcacaggtagaggagcaccaggctggtagccaggagaacacacatttccatggcaaagtttggaatgagatccatcgcattttctttttcaaatctatcttctgagtttttctttcagctgtgtgccgcttttggctgggctgtgcatgtagagctttctttctctgcccagaggtgatttagttaaggttaacaggaatatttatgtgctggggaatgagttgggtccatagctgcagccagtagaaaagctacctatgctgctcctcatgtggagggattggggtgctcttctcacattcacagttggtgaagaattatggccacccttattttgacctcctttgactttatattgtgtgatatcagtaaactaatcagtgtttgataagccccaagagttatagattcttatcagaaactcttgtgaagtcattggcattcaatctctaaccagcccttatcttcatggctgccttcaatccaaaatacttcaaatccatcaaaataatgcacacatacacatctttatccaggaagtttccactgcctagaatttctctatactccctagaagactactattcatcctttcaaacccagatcagatagacttctttttaagtttttattcatttatgtttctttttttcccacgcaatatacctatgttagcctgtacatgcattgctataaagaagtacctgagtctgggtagtttataaagaaaacaggtttaattggttcacgattctgcaggctatacaggaagcatgactggggaggtctcaggaaacttacaatcatggtgcgaaggcacatcttatattgaccagagaaggaggagggagagagagaagagggagctgctacacacttttaaacaaccagatctcatgagaattcactcactatcatgagaacagcaagggataagtctgaccccatgacacccaatcacctcccaccagacccctcctccaacattgaggattacaatttgacatgagatttgggtggggtcacaaatccaaaccacatcaatacccatataataatttgttttatttatttttttgagacacactctcactctgttgcctaggctagagtgcagtggcacaatcatagctcactgtaacctcaaactcccaggctcaagcgatcctcctgccttagtctctggagtagctgaggatacaggtatgcatcagcacacctagctaattttatttttttatttttatttttgtagagactgtgtgtctatgtttccgaggctggtctcgaattcctggcttgaagtgatcctctggcattggactctcaaagtgctgggattataggggtgagccactgcaccaagcccagacctctcctattagaggctttctctgatttaggaatcagacatgactgcttcctcctctgggcaacttctttcccccctcccatggttctattattgtctttcctcctctccagcaccgtgttggtttccacacatgagcagtggtgatcccttaccagagcatgagcttcttaaggacagtctgagtattattcaccactatgtctgcaggccctagctgagtcctttacacagagtgggcatccagaaagatttgttgagtttagttgggttagattgctgcatattgcaaaacttttcctgggactctttccctaggactctggtgaccaagccactttcctgcatacagcaagagcttttggctgggcctcagctgccattcctgtacattcagaatgatccaccaggattctgttgtcaagagggcctgtaatggagacacagggaaggagatgaagatgacggcttcagtgagaagcagcatactgtgctgcttcctgtgcaccccctcaaatggttctgcagaagacggaaagctagagatgctcctgaccaaagaatgcccctctctctggaaataatgcatgtctgggaacaatgggtgtgaaaggagagaagaggagaacagctacctggattgccaggtggactccagccaccttagccaccagggatgtggctgatgtcactacaagcagcacatacaacatcaaggactccaataagatgatttgagcttcttctttggggtagtaggggtcagaacagacacatcctgctttctgaagagtgaaatatttaccccaggagctggtaaggatgaggcctgcgacagcaatgctgtcatctgagagcccctctatgcctgcttgctggaagagatcccaaagctgagcctttggaaatggcactggctcattatcatcactgacccatgttccatgtctccttgccctgaggaattatgaattatgtgacaagtaaatcctcgacattcttaaaagtcagcagaaatacagccctaaactcctgggctcaagtgatcctcctgccctagcctctcgagtagctggaactacaggcatgcatcaacatgtccagactttatttgttgttgtagatatggggtcttgctataatgcctaggctggtctcaaagtgcgggctcaagcaatccttctctctcagcctcccaaattactgggaatacagacatcaaccactgagcctgatcttgatagaaattcttagtaaaaaggatgacttttaaatattaaatctagattctcaagcagtatggtaaactatttttgaaaagccatatacaattaaatttgtatatgttaaaacttgcaaaataatcttgagtaggctggacgtggttgcttatgcctgtaatgccagcactttgggaggccaaggccagcggatcacaaggtcaggagatcgagaccatcctggctaacacagtgaaaccccgtctctactaaaaatacaaaaaattagccgggcatggcggcgtgtgcctgtagtcccagctacttgggaggctgaggcaggaggatggcgtgaacctgggaggcggagcttgcagtgagccgagatcttgccactgcactccagcctgggcgacagagcaagactctgtctaaaaaaaaaaaaaaatcttgagtagatattatacattttaattatacaagcagccattgacttctgaaaagtccagtaacccctcctaattaaacccatcctatgaaatgatgggaagagggcttcaggagactttatttatttatttatttattgaaacagagtcttgctctgtgggccctgagctggagtgcagtgaagtgatctcggctcatcgcaacctccgcctcctgagttgaagcacttctcctgcctcagcctcccccgtagctgggattacaggtgggcactactgagcccagctaatttttgtatttttagtagagacggagtttcaccatgttggccaggctggtcttgaactcctggcctcagtgatcagcctgcctcggcctcccaaagtgctgggattacaggcatgagccaccgcgcctggcctgtgcttttgcttttaacatctcatcttggctacaaagagcagtgcaaatggggaacttctcaagtcctacagcattttgaccatagttttagcctcactcttatcaagtcagcaacactgtaacttccaatctcagttgagtggagggcaagcaaattgctatagagactgagaaacatcagcctgtagatgcctgggagctgggctagggactatcttccccttcccaaatgtgccacaagcctgctttctcccgcactgagccccctatttgtacagatgcacagattggctacaaagcttccattaagccacaaataggatgaaaaccatctctaccctcctccattcccatgcagaaatcctgcttcagagaaggagttgcatattgaatgcatgaatcctagaaataagacttagaaggtcttgtttgacatcaatcaatgacaactgtctttaagttcatcagggaaaagatcccaacttttctataaaggtaacaccatgttatttttaattttaaagtgacatgaatgtatttttctaagagacagacaaacacacccacaaacacccacacatacataaatgtcagattaaaattaaaaattaaataccttaaaatttgtggccaggaaccccaattcaactgcaaatcactccttgaacatttactgaatgcttgccatggaaatgtcccctgcaaagtgctatttgaattttatgaaagaaataaaatgaagtgatattttttaaggggctgaggacagacattcttagatatagagagaacttagtaaacaaacatgaatgatttagtgacaaatatgaaatcaggtgatgataacagcctgcagtaatgaataacaaagcagaggactgaatgggccctggactagatggaagggcttttcggaggaggttggggattgaaccaggacatgaaggatggggagaggataagaaagagagagggaagaacattcatagaattattgttgggttgagaactagcttggcttgtcagcaggaagggtcctggaaggtgagttctaacagtcaggatgaccctgacctctgggagattttctactctggaagaaatgtcttgatttagtgattctcaaatttggtttcacatgagaagcaatggagaggatgtttaaagcaacactgtggggaaagtattttagaatctctgagatgacacaagcatcgtgaatatttaaaactcccaggtgatcacaatgaacagctagtggttgagaaccactgtcataagaaatcttctggaaattcttttttaaatttttatttatttaaatttaaaatttttatttttggtgggtgtgagaaaacattttaaatgatccattttctttttttttttttttaatgtttttttttttaattatactttaagttttagggtacatgtgcacattgtgcaggttagttacatatgtatacatgtgccatgctggtgcactgcacccactaacgtgtcatctagcattaggtatatctcccaatgctatccctcccccctcccccgaccccaccacagtccccagagtgtgatattccccttcctgtgtccatgtggtctcattgttcaattcccacctatgagtgagaatatgcggtgtttggttttttgttcttgcgatagtttactgagaatgatggtttccaatttcatccatgtccctacaaaggacatgaactcatcattttttatggctgcatagtattccatggtgtacatgtgccacattttcttaatccagtctatcattgttggacatttgggttggttccaagtctttgctattgtgaataatgccgcaataaacatacgtgtgcatgtgtctttatagcagcatgatttatagtcatttgggtatatacccagtattgggatggctgggtcaaatggtatttctagttctagatccctgaggaatcgccacactgacttccacaatggttgaactagtttacagtcccaccaacagtgtaaaagtgttcctatttctccacatcctctccagcacctgttgtttcctgactttttaatgattgccattctaactggtgtgagatgatatctcatagtggttttgatttgcatttctctgatggccagtgatgatgagcattttttcatgtgttttttggctgcataaatgtcttcttttgagaagtgtctgttcatgtccttcgcccactttttgatggggttgtttgtttttttcttgtaaatttgtttgagttcattgtagattctggatattagccctttgtcagatgagtaggttgcaaaaattttctcccatgttgtaggttgcctgttcactctgatggtagtttcttttgctgtgcagaagctctttagtttaattagatcccatttgtcaattttgacttttgttgccattgcttttggtgttttggacatgaagtccttgcccacgcctatgtcctgaatggtaatgcctaggttttcttctagggtttttatggttttaggtctaacgtttaaatctttaatccatcttgaattgatttttgtataaggtgtaaggaagggatccagtttcagctttctacatatggctagccagttttcccagcaccatttattaaatagggaatcctttccccattgcttgtttttctcaggtttgtcaaagatcagatagttgtagatatgcggcattatttctgagggctctgttctgttccattgatctatatctctgttttggtaccagtaccatgctgttttggttactgtagccttgtagtatagtttgaagtcaggtagtgtgatgcctccagctttgttcttttggcttaggactgacttggcgatgtgggctcttttttggttccatatgaactttaaagtagttttttccaactctgtgaagaaagtcattggtagcttgatggggatggcattgaatctgtaaattaccttgggcagtatggccattttcacgatattgattcttcctacccatgagcatggaatgttcttccatttgtttgtgtcctcttttatttccttgagcagtggtttgtagttctccttgaaggggtccttcacatcccttgtaagttggattcctaggtattttattctctttgaagcaattgtgaatgggagttcactcatgatttggctctctgtttgtctgttgttggtgtataagaatgcttgtgatttttgtacattgattttgtatcctgagactttgctgaagttgcttatcagcttaaggagattttgggctgagacaatggggttttctagataaacaatcatgtcgtctgcaaacagggacaatttgacttcctcttttcctaattgaataccctttatttccttctcctgcctgattgccctggccagaacttccaacactatgttgaataggagcggtgagagagggcatccctgtcttgtgccagttttcaaagggaatgcttccagtttttgcccattcagtatgatattggctgtgggtttgtcatagatagctcttattattttgaaatacgtcccatcaatacctaatttattgagagtttttagcatgaagggttgttgaattttgtcaaaggctttttctgcatctattgagataatcatgtggtttttgtctttggctctgtttatatgctggattacatttattgatttgtgtatattgaaccagccttgcatcccagggatgaagcccacttgatcatggtggataagctttttgatgtgctgctggattcggtttgccagtattttattgaggatttttgcatcaatgttcatcaaggatattggtctaaaattcccttttttggttgtgtctctgcccggctttggtatcagaatgatgctggcctcataaaatgagttagggaggattccctctttttctattgattggaatagtttcagaaggaatggtaccagttcctccttgtacctctggtagaattcggctgtgaatccatctggtcctggactccttttttgttggtaaactattgattattgccacaatttcagagcctgttattggtctattcagagattcaacttcttcctggtttagtcttgggagagtgtatgtgtcgaggaatgtatccatttcttctagattttctagtttatttgcatagaggtgtttgtagtattctctgatggtagtttgtatttctgtgggatcggtggtgatatcccctttatcattttttattgtgtctatttgattcttctctctttttttctttattagtcttgctagcggtctatcaattttgttgatcctttaaaaaaaccagctcctggattcattgattttttgaagggttttttgtgtctctatttccttcagttctgctctgattttagttatttcttgccttctgctagcttttgaatgtgtttgctcttgcttttctagttcttttaattgtgatgttagggtgtcaattttggatctttcctgctttctcttgtaggcatttagtgctataaatttccctctacacactgctttgaatgcgtcccagagattctggtatgtggtgtctttgttctcgttggtttcaaagaacatctttatttctgccttcatttcgttatgtacccagtagtcattcaggagcaggttgttcagtttccatgtagttgagcggctttgagtgagattcttaatcctgagttctagtttgattgcactgtggtctgagagatagtttgttataatttctgttcttttacatttgctgaggagagctttacttccaactatgtggtcaattttggaataggtgtggtgtggtgctgaaaaaaatgtatattctgttgatttggggtggagagttctgtagatgtctattaggtccgcttggtgcagagctgagttcaattcctgggtatccttgttgactttctgtcccgttgatctgtctaatgttgacagtggggtgttaaagtctcccattattaatgtgtgggagtctaagtctctttgtaggtcactcaggacttgctttatgaatctgggtgctcctgtattgggtgcataaatatttaggatagttagctcctcttgttgaattgatccctttaccattatgtaatggccttctttgtctcttttgatctttgttggtttaaagtctgttttatcagagactaggattgcaacccctgcctttttttgttttccattggcttggtagatcttcctccatccttttattttgagcctatgtgtgtctctgcacatgagatgggtttcctgaatacagcacactgatgggtcttgactctttatccaacttgccagtctgtgtcttttaattgcagaatttagtccatttatatttaaagttaatattgttatgtgtgaatttgattctgtcattatgatgttagctggtgattttgctcgttagttgatgcagtttcttcctagtctcgatggtctttacattttggcatgattttgcagcggctggtaccggttgttcctttccatgtttagcgcttccttcaggagctcttttagggcaggcctggtggtgacaaaatctctcagcatttgcttgtctataaagtattttatttctccttcacttatgaagcttagtttggctggatatgaaattctgggttgaaaattcttttctttaagaatgttgaatattggcccccactctcttctggcttgtagggtttctgccgagagatccgctgttagtctgatgggctttcctttgagggtaacccgacctttctctctggctgcccttaacattttttccttcatttcaactttggtgaatctgacaattatgtgtcttggagttgctcttctcgaggagtatctttgtggcgttctctgtatttcctgaatctgaacgttggcctgccttgctagattggggaagttctcctggataatatcctgcagagtgttttccaacttggttccattctccacatcactttcaggtacaccaatcagacgtagatttggtcttttcacatagtcccatatttcttggaggctttgctcatttctttttattcttttttctctaaacttcccttctcgcttcatttcattcatttcatcttccattgctgataccctttcttccagttgatcgcatcagctcctgaggcttctgcattcttcacgtagttctcgagccttggttttcagctccatcagctcctttaagcacttctctgtattggttattctagttatacattcttctaaatttttttcaaagttttcaacttctttgcctttggtttgaatgtcctcccgtagctcagagtaatttgatcgtctgaagccttcttctctcagctcgtcaaaatcattctccatccagctttgttccgttgctggtgaggaactgcgttcctttggaggaggagaggcgctctgcgttttagagtttccagtttttctgttctgttttttccccatctttgtggttttatctacttttggtctttgatgatggtgatgtacagatgggttttcggtgtagatgtcctttctggttgttagttttccttctaacagacaggaccctcagctgcaggtctgttggaataccctgccgtgtgaggtgtcagtgtgcccctgctggggggtgcctcccagttaggctgctcgggggtcaggggtcagggacccacttgaggaggcagtctgcccgttctcagatctccagctgcgtgctgggagaaccactgctctcttcaaagctgtcagacagggacacttaagtctgcagaggttactgctgtctttttgtttgtctgtgccctgcccccagaggtggagcctacagaggcaggcaggcctccttgagctatggtgggctccacccagttcgagcttcccggctgctttgtttacctaagcaagcctgggcaatggcgggcgcccctctcccagcctcgttgccgccttgcagtttgatctcagactgctgtgctagcaatcatcgagattccgtgggtgtaggaccctctgagccaggtgtgggatatagtctcgtggtgcgccgtattttaagccggtctgaaaagcgcaatattcgggtgggagtgacccgattttccaggtgcgtccgtcacccctttctttgactcggaaagggaactccctgaccccttgcgcttcccaggtgaggcaatgcctcgccctgcttcggctcgcgcacggtgcgcgctcacactggcctgcgcccactgtctggcactccctagtgagatgaacccggtacctcagatggaaatgcagaaatcacctgtcttctgcgtcgctcacgctgggagctgtagaccggagctgttcctattcggccatcttggctcctcccccttaaatgatccattttcaaggcatggtaaatctaagcactggcagccagcctgtggatgtaacaaactgcacggctcatgcacctagaaggtcataataagtgaacagaatgtagaggaggggtcagcccataaaagggaagaaagttttattatcaggaagtcaaacttaagcagggaagggaaccggggtataaccttataagggggataatgaaacttaggcgatgtccaggaagataactctgtagtacttgaccaatgaggaactgggggaaggaattctgtgctaggagataaattacctgctgtaactgccctggttgtacctgcctaccagacacccgatcttgcaaggccaccattaaaagtcttgcttccggccaggtgcagtagctcacacctctaattccagcactttgggaggccaaggccaggagtttgagaccagcctggccaatatggtgaaacactatctgtactaaaaatacaaaaaatacaaaaatacatggacattgtccatggcaagcattcagtaaatagtcaaggagtgatttgcagttgaattggggttctaggccacaaatttccaagcatggtggtgcacacctatagtcccagctacttagaaagctgaggcaggagaatcgttttaacccgggaggcagaggttgcagtgagctgagatcacaccattacactccagcctgagcaacagagcgagattttgtctcaaaaaaaaaaaaaagtctcacttccactgttcttcatgtctccaagttcattctttgggtttggacaggtgaatgtgtttaccacaaacttgtggacccacctggggcttctgtgcctgtgtggagtgggactcttgctgagaggggagacacatctcacctgatttagatagcccgctctgtttaggtatcccgacttcccgcagaggccatagacaaacctgagactgttattcaggaggcagaggaggtgacacaggaggaaagaaggcaccacagcaaccaggcaaccttgtgtatgagccgaggaagaaaaattggaccataagtactaccttggtggttgggcatttttggaggtcaagtgtgtgtgactgagatgtatcctagatatgaagtgagtgcggagtcccaatctgcagttctgttctcccacgagggaaatggccatagatggatgaagcgattctcagggtgtgcaggaaacctccagtgaggctggggggtggttgagtacacagggaaaaagctcagacacagagactgactgaagatgagaaacagaaattctaggcctaaggcacaaaggaaagagggagccaaaaagattccctctgacattcccccggacagtcctttagggataatgctgcaggtttggagggacaaccctcaagccagggacaaagaaaagaaaagatggtaagtactgctgttttatctgtcctaaagaccccattcataagccttcagtcttttgacctaggtttggcccagatgaggattgggtgtgccaagctttatttttctatgtgaatgataaaaccccatcctcacaagagataagttatgctgtctgctggatcaaggaattagccctcatattcccccttcaaagaaaaagaaaaagaacctagtaaaaaatccttgcccagtgaaaagccatgggaccccctatcatgcttgccccctccatacctctcgcaaaataggggacaggaagatcaaggggcagcaggaggattagcggaagaaagacctggagaccatgggggagccgaacaaattgctcctttaaaaccttatccaaattcaagcaaagtattagaacagtgaagtagactgagtacaagtcccttagcagcattacaaaaggtccaaaagcctatagtcctggaacaggaattaaaagaaattaaagagtgtgtaaagcagaaactcagttgtatataagaaaacccaactccccctgagaaagagaaagagctggagtcctttaaaattaactgcctgtttttctgtggctagtaagccttatctcttctcccttcccaggttttgtgaagactctgtttctcttgccatgcagctgccagatcactagacagataaactcaagtcacaaaacatatttttccttaaagagtaagaaatgatgtaatgcatgtctcaattaaataactgtctttgtttctctcttctgtagtatgcttccccctgtacagatctcccccgacccatgaaatacttaaaagataaccctttgttcaaggctcagtcctttggatattaatctgactgggctttctatcagacttgtctttctttttaaggctgaataaccttccattttgtgtatacatcacatttcgtttacccattcatatgtcaatggacacttaggctgtgtctaccttttggatattgtgaataatgctgctatgaacatggcttaaaaaatatctttttggagtccagtttcagttattttcggtatatatccagaaataatatcactggatcatacagtaattgtattcttaattttctgaggaaccaccacacttttccatagtggctgcaccattttacattcccaaatagaagctacagatgttccagttcttccatatcttcaccaacatttgctattttttagttgttttttttatagtagctatcctaatgggtgtgaggaaatatctcatcatggttttgattagcattccctaatgatttgtgatattgagcattttttcatgtgctttttgctatttgtatatcttcattggagaaatctctattgaagtcctttgcctattttttaagtcaggttatttgtttttgttgttgctgaattacaggaattctttatatattctggatattaaccttttttcagatacttaaattgcaaatattttcttacattctataaattgctttttcacttcgttgattgtgtcctctgtcacacagagtttaatttcaatgtagtccacattatctatattttcttttgtcgcttgttcttttggtgtcatattcaagaactcattgccatatccaatgtcataaatcttttcccttatgtttctttctaagagtttttatagctttagctcttttacttaggtctttgatccatttcagtgaatttttatgtatggtgtaagctaacggccaagtttcattcttttgcatgtagatatcaattttcccaatactatttgttgaaaagactgtctgtccattccctattggtcttggcacccttgtcaaaaatcatttgaccatgtatacaaagttgatttctgagctctctgttttgatccattgatctctatgtctgtctttatgccagcaccatactgttttgattactgtagctttgtagtaagttttgaagtcagaaaatgtaagacctccagctttgtaattttttcaagattattttggctatttggggtcccttgagattttgcatgaatttttttgtttctaacaaaaaaacccaccgtttggatttggacagaaattgcattaaatttacagatctctttgggtagtattgacattgtaagtatattaagtcttccaattcataaacatgaaatgcctttccatttattggcgtctttaatttctttaagcaatgttttgtagttttcaatgtatgtttctttccttcttggttaagtttattcctaagtattttattctttttgatgctattgtaaatggatttttttcttaattttcttttcagacggctcatagttagtgtatagaaacacaactgatttttgtgtgttgattttgcatcctgcaactttgctaaatttgtcttgaactcctgatctcaagcgatcctcccagctcagcctcccaaagtgcctgggattataggcatgagccaccatgcccaactatgccaaatttgtttattagttctagcagcttttcttgtggaatcttcagtggttgctacatataaaatcatgccatttgtgaacagggataattttacttcttccattctaacttggatgccttttatttatgtttcttagttaatcgatctggctagtgcttccagtattatgttgaatagaagtggtaaagtagatatccttgtcttgtgcctgatcaagcagaaaaagttttcagtctttcataaatggaaatgaagacatatgtggcctttattatgttgaggtattttccttctattcttaatttattgagtgtttttatcatggaatggtgttaaattttgtcaaatactttttctgcatcaatttagatcatcaatcacgtagtcttttttttcctcttcattctgttaatatggtgtacattggttgattgacatctgctgaatcacccttgcattctaggaataaatctcatttggttatggtttataatccttttaatatgctgttgaattctatttgctagtattttgatgaggatttttgcaccaatattcatcagatattttggcctatagttttcttgtagtgtctttatttttctttggtatcgaggtaacactgcctcatagaatgagtttggaaatgctccctccctttcaattttttggaagaattcgaagacaatttgtttttgacaatgatccctttaatgtttggtagaattcaccagtgaatccatgtgtcctggactttttattatgggggggttttgatcagtgattcaacctccttaacagtcacagatctgttaagattatttatttattctgattcaaacttggtaggatgtgtttttataggaatttgtccatttaatcaaggttaaccaatgcattgttgtacaattgttcatagtactatcttattatttttatttttgtaaatttgatagtcatatcctttcttttctaatttccattatttgtgtatttttttcttactgtatctaactaaaagtttgaccattttgttgatcttttaatgaaccaactcttggtttcattgattttctctattgcttttgtattcctgattttgtttttctttgctctaatctttattattaccttacttttgctagctctgggtttagtatatttttcttttccagtttcttaatgtataaggtcagattgtagatttgagatctttcttctttctattttttttctgtgataacagattaatttaaattctagacctgaagctctacaagggtatgctctttaaacattctataaatgtgtacaactgtgcaataccacttaaaatctcagaaaacgaacacactttagaattgtttaaacacaatccacagaattaaaaacaaaaccagaagccattcacagttatactattgtcaattaaaagttttatacttaatacttgatataacagtcaatatctagtgggggatattgaaagtgatttcagggggcagagccaagatggccaaataggaacagctccagtctacagctcccagtgtgagtgacgcagaagacgaatcatttctgcatttccaactgaggtatcgggttcatctcactggggattgttggacagtgggcacaggacagtgggtgcagcacactgagcatgagccgaagcagggtgaggcatcatctcacctgggaagtgcaaggggtcagggaattccctttcctagccaaggaaaggggtgacagacggcacctggaaaattgggtcactccctccctaatactgggcttttccaatggtcttagcaaatggcacaccaggagattatatcctgcgcatggctcagaggttcctatgcccatggagcctcactcattgctagcacagcagtctgagatcaaactgcaaggaggcagtgaggctgggggaggggcgcccaccattgccgaggcttgagtaggtaaacgaagcagctgggaagctcgaactgggtggagcccaccacagctcaaggaggcctgcctgcctcagtagactacacctctgggggcagggcatagccaaacaaaaggcagcagaaacttctgcagacttaaatgtccctgtctgacaactttgaagagagtagtggctctcccagcatgcagcttgagatctgagaacagacagactgcctcctcaagtgggtccctgacccccgagcagcctaactgggaggggcagactgacacctcacacggccaggtactcctctgagacaaaacttccagaagaatgatcaggcagcaacatttgctgttcaccaatatccactgttctgcagcctctgctgctgacacctaagcaaacagtgtctggagtggacctccagcaaattccaacagacctgcagctaagggtcctgactgttagaaggaaaactaacaaacagaaaggacatccacaccaaaaccccatctgtacatcaccaccatcaaagaccaaaggtagataaagccacaaagatggggaaaaaacagagcagaaaaactgaaaattctaaaaatcagagcacctctcctcctccaaaggaacacagctcctaaccagcaacggaacaaagctggacagagagtgactttgatgagttgagagaagaaggcttcagacgatcaaactactccaagctaaaggaggaagtttgaacccatggcaaagaagttaaaaaccttgaaaaaagattagacaaatggcttactagaataaacaatgcagagaagtccttaaaggacctgatggagctgaaaaccatggcacgagaactatgtgacaaatgcaaaagcctcagtagccgaagcaaacaactggaagaaagggtatcagtgatggaagatgaaatgaatgaaatgaagcgagaacagaagcttagagaaaaaagaataaaaagaaatgaacaaacctccaagaaatatgggactatgtgaaaagaccaaatctatgtctgactggtgtacctgaaagtgacggggagaatggaaccgagttggaaaacactctgcaggatattatccaggagaacttccccaatctagcaaggcaggccaacattcaaattcaggaaatacagagaacaccacaaagataatcttcgagaagagcaactccaagacacataattgtcagattcaccaaagttgaaatgaaggaaaaaatgttaagggcagccagagagaaaagtcgggttacccacaaagggaagcccatcagactaacagctgatctctcggcagaaactctacaagccagaagagagtgggggccaatattcaacattcttaaagaaaagaattttcaacccagaatttcatatccagccaaactaagcttcataagtgaaggagaaataaaatactttacagacaagcaaatgctgagagattttgtcaccaccaggcctgccctaaatgagctcctgaaggaagcactaaatatggaaaggaacaaccagtactagccactgcaaaaacatgccaaattgtaaagaccatcgaggctaggaagaaactgcatcaactaacgagcaaaataaccagctaacatcataatgacaggatcaaattcacacataacaatattaaccttaaatgtaaatgggctaaatgctccaattaaaagacactgactggcaaattggataaagagtcaagactcatcaatgtgctatattcaggaaacccatttcacgtgcagagacacacataggctcaaaataaagggatggaggaagatctaccaagcaaatggaaaaccaaaaaaggcaggggttgcaatcctagtctctggtaaaacagattttaaaccaacaaagctcaaaagagacaaagaaggccatttcattatggtaaagggatcaattcaacaagaagagtgaactatcttaaatatatatgcacccaatacaggagcacccagattcataaagcaagtctttagagacctacaaagagagttagactcccacacaataataatgggagactttaacaccccactgtcaacattagacagtcaacgagacagaaagtcaacaagtatatccgggaattgaactcagctctgcaccaagtggacgtaatagacatctacagaactctccaccccaaatcaacagaatatacattcttttcagcaccacaccacacctattccaaaattgaccacatagttggaagtaaaacactcctcagcaaatgtaaaagaacagaaattataagaaactgtctctcagatcacaatgcaatcaaactagaactcaggattaagaaattcactcaaaaccgctcaactacatggaaactgaacaacctgctcctgaatgactattgggtacataatgaaatgaaggcatgttctttgaaaccaacgagaacaaagacacaacataccagaatctctgggacacattcaaagcagtgtgcagagggaaatttatagcactaaatgcccacaagagaaagcaggaaagatctataattgaccccctaacatcacaattaaaagaactagagaagcaagagcaaacacattcaaaagctagcagaaggcaagaaataactaagatcagagcagaactgaaggaaacagagacacaaaaaacccttcaaaaatcaatgaatccaggagctggttttttgaaaagatcaacagaattgattgactgctagcgagactaataaagaagaaaagagagaagaatcaaatagatacaataaaaaatgataaaggggatatcatcaccaatcccacagaaatacaaactaccatcagagaatactataaacacctctatgcaaataaactagaaaatctggaagaagtggataaattcctggacacagacaccctcccaagactaaaccaggaagaagttgaatctctgaatagacccataacaggctctgaaattgaggcaataattaatagcttaccaaccaaaaaaagcccaggaccagatggattcacagctgaattctaccagaggtacaaggaggagctggtaccattccttctgaaactattccaatcaatagaaaaagagggaatcctccctaactcattttatgaggccagcatcatcctgataccaaagcctggcagagacacaacaaaaaaagagaattttaaaccaatatccctgatgaacactgatgcaaaaatcctcaataaaatactggcaaaccaaatccagcagcacatcaaaaacttatccaccatgatcaagtgggcttcatccctgggatgcaaggctggttcaacacatgccaatcaataaacataatccagcatataaacagaaccaaagacaaaaaccacatgattatctcaatagatgtagaaaagacctttgacaaaattcaacagcccttcatgctaaaaattctcaataaattagatattgatgggacgtatctcaaaataataagagctatctatgacaaacccactttttgatggggttgtttgtttttttcttgtaaatctgttttagttctttgtagattctggatattagccctttgtcagatgggtagattgcaaaaattttcttccattctataggaagtggggtgattacaagggtccagggcagtgggtgagggtgggggtgttcctctatgtctctctgcagcacagctatacatatggccatctgggagcactgttttcttaagttttagcttaggttcaggggtacatgaacctaaggtttgttacataggtaattatataacaggtttgttatataggtaaattacatgtcccaggggtttgttgtgcagataattttgtcaccgggacaacaaacctagcacaggataggcagttttttttacccttaccctcctcctaccttctgcccccacataggccccagtgtctgttgttttcttctttgtgtccatgtgtacttgatgtttagctatcactcataagtgagaacatgccgtatttggttttctgttcctgtgttaattaacttagaataatggcctccagctctgctcttgtccctgcaaaggacatgatcatattatttttaatggctgcatagtattccatggtgtatgtgtgccacatttttttttttacccagtctatcattgatgggcatttaggttgattccacgtctttgttattgtaagtaaagccactgtggaaagcagtttggcaatttctgaaataacttaaaatataattgctatttgactcagcattattgacccactattgacccattattgagtatttacccaaaggaatgtaaatattctaccataaagacacatgcacacatatgttcattggggcactttttttttaatggaaatgtttataactacaagtttcccttttagcattgttttgctgcatctcatcagttggtatttttttgttttcataataacgaaacaaaaaatatcttgtcttgagatattttctaatttctcttgtgatttattctttgacccattggttgtctaagagtatgttttttaattttcatgtatttgtgaattttccagttttcctcctgctattgatgtctagttttatttaattgtgattggaaaagatacattacatgatttcaatctttttaaatttattaagacttgttttgtggcctaatacatgatatatcctgaacaatgttctatatgcacttgagaaaaatgtcttctactactgttgggtggaatgttctatatatgtctgttgggtctaattggcctatagtgttgttcttgtctcttatttccttattatcctctgtttagttgttctatttaatatcgaaagttgactgttgaagcctcttactattattgtagagctatttattttctcatttaattctatcaatatttgtgtcatatacttaggagctctgatgtttagtacatatatgtttataattattatatctttttggttaattcactcttttatcattatgtaatgttctttgtttcttgtaacagtttttgaactaaagtcaatcttgtatgacactagtgttagtatagctactccttctatcttctgattattatttgcagggaatgtctttttctattctttcactttcaatgtgtgcatgtttttagatctaaagtgagtcacttgtagacagaatatagttggatcctatttgttttattcactctggcaatctatgtctttatattgaggggtctaatgtatttacatttaaaacatactgatggggaaggacttactactgtgattttgttatttgtcttctgcatatcttacagcttttttgtccctcattttcttattgcctttctttgtatttggttgatattttatagtgacatgttttgattaccttctcattttctattgtgtattctgtatatattttctttgtggttaccatggtgattacataaaacttcctaaggttataacaatgtattttaaattgattacaatttaacttcagtttcattaaaaaccactactcctttacagctctgcactccctcctttatgttatttatgtcacaaattacatctttttatatcatgtacccatttacatagacatagttatttgttatgctttggtcttttatatcctataaaataattaaaagaggagctacaagcctaagttgcaataacacaggttttagatttgtacatatatttacttttaccaaataactttatattttcatattttcatatggtttctagtcactttctagcaataaataaataaataaatcaaggagaatccatctctaccagcctgtcacagcactaaaagaataccacgcagtccctgcctctttcctaaaatttttttttaaattttggcttttgttgttataactttaccaaaattatttaaagtaactttaccagcattgagttttattgactaaagtcccccggattatttcatgggtataaacccattttgtttcagccagtttgcatggggccttttctttggaaaaaataatttctgaattgctggcaagatggcggaatagaaacagctccgttctgcagctcccagtgagatcgacagagaaggcaggtgatttctgcatttccaactgaggtacctggttcatctcattgggactggttggacaagagggtgcagcccacggagggtgagccaaagcagggtggggcgtcgcctcacctgggaagcacaaggggtcgtggaattttctcccctacccaaggaaagccataagggactgagcctgaggaactgtgcactctggcccagatactgcacttttcccatggtctttgcaacccgcagaccaggagattccctccggtgcctatgccaccagggccctgggtttcaagcacaaaactgggcagccatttgggcagacaccgaactagctgcaggagttttttttttttttttccataccccattggcacctggaacgccagtgagacagaaccgttcactcccctggaaagggggctgaaaccagggatccaagtggtctggctcggtgggccccacccccatggagcccagcaaacaaagattcacttggcttgaaattcttgctgccagcacagcagcagtctgagattgacctgggaccctcgaacttggttgggtgctgtgggggggcatcttccattgctgaggcttgagtaggtggttttaccttcgcggtgtaaacaaagctgctgggaagtttgaactgggtggagctcaccacagctcagtaaggccactgtggccagactgcctctctggatttctcctctctgggaaggatatctctgaaaaaaaggcagcagccccagtcagggacttatagatgaaacccccatctccctgggacagagcccctcggggaagaggtggcttccaccattgtggaagactgtgtggcaattcctcacggatttagaactagagataccatttgacccagcaatcccattactgggtgtatacccataggattataaatcattctactataaagacacatgcacacttatgtttattgtaacactatttacaatagcaatgacctggaaccaatccaaaagcccatcaatgatagactgaataaagaaaatgtggcacatatacactgtggaatactatgcagccataaaaaaggatgagttcatgtcctttgcagagacatggatgaagctggaaaccatcattctcagcaaactagcacaataacagaaaaccaaacactgcatgttgtcactcataagtgggagttaaacaatgagaacacatggacacagggaggggaacgtcacacactggggcatgtcggggagtgggggcctacgggagggatagcattagcagaaatacctaatgtaggtgacgggttgatgggtgcagcaaaccaccatggcacatatacacctatgtaataaaactgcacgttctgcacatgtaccccagaacttaaagtataattaataataataataatttctgggcatgtaagtagctgtctttcaggttctactttgatacatattctgagagaattaaacctgtcaaagaaaccttgactttcaatggcaggcactggaattgaccctaataatgtgttttggggtaagcctactcatattctcaacctgtctgcagtagtcgttagaatctgaacttcctgaagttcatgtgcaaagttgagttaattgtttaatattcaacaaggattatgccagtaagatggtaggaaaatattagatatgtgtcatcactgctggtattatttaaactgcaacatattttagctggctgctgatctcagccaccatgcctgcattttatctctgtctcgtggtctgcaaccttggaagctttgaacttagctcatagaatcctgggcatcaagaacatgtggttctaatggctagatagggaatgagagtaaaaggattttgcccacggtcacgtgagtaaacaacagatttggaggggtctggactactgtgatgacttcattctgacaatatgttccagttgtcctttcatttcctcctaatcacatgtctggtctgatctggctgtttcccaccttccaattcctgccttctccaatgctcccttccgtaggtcactctgtggctcagagaccctgcttagcaagcgcccaacctttcaattatttgttcagtaaaacttgaactcatgtctccccttcttgataaaaagaaaatacgttatgtaatgtcgggttactctataactcttgtcctgtctctcggcaactactgaactaactgttttcatattgagcaaacgtttatggaaggactgccaagagtcaggtactaggcttggtaatattccccgttctctctagtcaaagccaacaccagccagacttgcagatctaggtcccaagcccactgcagatcacaggccagggtctggtctcctctgagctcctttgggagggaaagacagaattattaacacccattttgtagattaggcaactgaggctgaggaagtttaaataactcagacagggcctgcacgtcagtcatattccaaggatccctactcactgtcttctctctacagaacgagatgtctctggagtccatagaaagcccaggagcctggctgggcacggtggctcctgcctgtaatcccagcactttgggaggccgaggcaggcagatcacctgagctcaggagttcaagaccagcctgggcaacatggcaaaaccccatctctactaaaaatacaaaaaattagctgggcgtggtggtgcatgcctctaatcccagctacttgggaggctgaggcacaagaattgcttgagcccaggaggcagcagttgcagtgagccgagattgtgccagtgcactccagcctgggcaacagagcaagattccatttcaaaaacaaaaacaaacacaaacaaacaaacaaaaatagaaagcccagggaccacctgcgtcaggttcccagccacacctttttcttgtcctcctctgtctctggcatcttctcacaggttcctaattgtttgtggttgcacaaattcaaaatcccagaaaaattaccacttcacacccactcagatggctattttttttttgaaggaagataacaagtgttgacaagaacatggagaaattggaattctcacccattgctggtgagaatgtaatacggtgctgctgctatggaaaacagcttggagtttcctcaaaaagttcaacagaatttcaatgtgacccagcaattcccctctaagttatagatctgagaggattaaaaacagttactaaaatacacggactcacatatttctaacagtccaattcacaagggccaaaaggtgctaatagcccacatgtccatcgatggatggataaataaattgtggtctatccatacaatggaatattattcggccataaatggaatgaagtactgacgcatgctacagaatggatgaaccgcaaaaaaaatggatgaacacatgctacagaatggatagcctcactttactatgaagtgaaggccagaaacgaaagtccatatattgcatcatacaaaatatccagaagagggaagcccacagagacagaatgtgcaatggtggatgccagggtctggggagaggggagagtggggagaaactgctcaactggtacaggctttattttggaatgatgggaacattttgcaactagatagaggtagtgattgcagaacacagaatgtactgaattccactgatttttttcaccttaaaatggttaattttcagtcctgagattggataatcataaaaaaatggttaattttatgttatgtgaatttcatccctatacatattttaaacctcagaaatatacactagcaggcatggaacaggtcactgtggtgcctgccaagcccggtgatgttatctggggtccccggccagccttaagcctcttgctgaccggtggagggcagaacctttgccctaaaagtataatatccacatgctggcatgattcctggccagatggcttctttattagcagtaattgaaactgcctcgatacagacactgtaccttgcaaccaaaaaatgactcaacaatgataataagggttaagctgggcctttctctctttgccagttaaattatatttattatagcttgacatgaaaaacaaagcaactccaacaggtatcacaagggcaaaggacatgaacattttatcaaagaagaaatgcagctgtcaaaaatacagaaatattcaaccttgttcataataaagtggctgggctcagtggttcatgcctgtaatcccagtgctttgcaaggctgagacaggaggatcatttgaagccagaagttcaagaccatcctaggcaagtcagttcaataccagacttcatgtctacaaaacatcaaaaaattagccaggcatggtgatgcatgcctgttgtcccagctactcaggaggctgaggcaggagaattgcttgagcctgggaggctgcggtggcggtgagccatgattgtgccattgtactccagcctgggcaatgcagcaagactgtctaaataacaaaaataatagtaaagaaaaggattgggatgccatttcttgcgtattcaatacacagagttaaaagtaatttctacgttttctatttttttattactaaaaaaagctggaccattctcacagcctgaaatgcttctcactttcccttcttctgtccaaacacttctctatgataatgcaaacagtcactcctttaggaagacttcaccccaggtagttccagatccccttatctctgccttcccagaactcctggtgtctctccagttccctccgtgtggtgaagtaccctacctagggtttcagtatggctctgtctgcaaaggtcttgttcacaccttcccttatggttctgttgccctgtgttgtgtcatagcacagggcacagtggagaacccattcacactgatagagagggccccatggtcctggagataaccatgtaaccgatcagaatagggcattgagggctgggtgtcaggcgtgggctgcacttgggtgggcaggtcccctggaaagtcactgggtttggcaagcttcctagtaacatgtctctctggggtccccttggaacttcatgcaaaaatgctggttgctggtttattctagagagatggttcattcctttcatttgattatcaaagaaactcatgtcccaattaaaggtcataaagcccagtttgtaaactgagatgatctcagctgaatgaacttgctgaccctctgctttcctccagcctctcggtgcccttgaaatcatgtcggttcaagcagcctcatgaggcattacaaagtttaattatttcagtgattattaaaccttgtcctgtgttgaccccaggtgaatcacaagctgaacttctgacaagaacaagctatcatattcttttcaattacagaaaaaagtaagttaattgataggattttttttgtttaaaaaaaatgttactagttttgaaaaggtaatatgtgcacatggtaaacactaagaaggtataagagcataatgcttttatactactaagaataatgttttctctaagttttttttggtagatgctttcatcagattaagaaaattccctgctattagttgttgaaggtttttatatcataaatgaaagttgaatattattatcatatattattaatatattgttattgaactatcaaagccttttcctaaaaccattgagatgatcttataaccattctcctttaacctgttgacgagatcattggtatttatactatttctctgttaaccattcttgagtctcaggtttaaattcaacttggtcatggtgtgtcatctttgatcattgctgtctgtggcttgctactgttttgtttaggatttttgcactgatgctcatcaatgagactggcatgccatcttcctttgcagtcctgatttttttctgatttggatcatgtggttatggccctcatggaatgagttgggcatgatgcctttttttcatgtctctggattgatgggacactttggattctctccagatggccctcaatggtccctgcctcctcattgttaggcccctgggcaagcccttctcatttctggtaggcccaggaacctgtgggggttttgtttgtttgtttgtttcttgagtcggagtctcactctgtcacccaggctggagttggagtgcaatggcccgatcttggctcactgcaacctccacctcccagattcaagcaattctcctgcctcagcctcctgagtagctgggattacaggcacccaccgacacaccctgctaatttttgtatttttagtacagatggggtttcacaatattggccaagctggtctcgaactcctgatctcatgatctgcccggcttggcctcccaaagtgttgagattacaagcatgagccaccacacccagtgaacctgtggtttttagaagctccccatgcatgtgaatgctgtgagcatcccaggatgacagccactgtgtgttcagctgttggaactgtgagaaagcaccagtgggaccctctccagcacctgcctgctgaggtcatggaagaggcttgttggggagatgatgccctggctgactcctgaaggatggttaggaatgcaccagatggaagctgggttggacccactctatgctgaagaacagcttgtgtggacacaaggagacacggatatgtcatttttgtagagcctgaggagtgtccaatcacaccatttgcttaaaacatcatgcacacttggaaaagtggactgagaccgaatgaagaagctaacagtggccagatcagaaagggtcttgtgttacttcctagagatacttagattttatcctgtgggtgataggagcagttggagggactgaagacaaggaaagaaacatgtttcaagatctatgtttttcaagacgctttctggtggctgagtagggaattccctggataagtcctgcccagggtcaggcaaaacaagttagggggttactgaaataaggagtatgagaaatggtgtaggttgtgctgacgttttgtaacacatctcatgatgatcttcatttccttcactaatttcctgtttcattaattcccttccacgtgctcttctgaaatttgcctcacattctctgatttctcttttacctgttggtttcatcaccttttactttttgctttcctggaaacacaaatgattctgattgtgacatgtcagaattatttgcaacatttgcctttctgctgaaaccatgagttcactgaatacacaatttagtaaagtgtaggatgcacatgtcgttttcgtggtcacaaccagctctgtagcattttataactacactggcagtgtgctgggaggtgtagagagaaatatttatcacatgtgtggctgacacaacctgccaagttattttaggagcctccttggaatcccagcaagaatgctaccggcacaatttgtaatcacagcatcctgctccatgccttggcttcatggcatagtcacttctgcaagtctctttccagctgtctgttcccatgtctataaagtatgagttaaatcatcctaacactactcatcttacaaagttttcttgctgatgttaagagagttgggaaagaactgtataaactgtgaagtgccatggagatgttagtggttactttatcaagaaatagacactctagaatggagtagaaagccaacagttatgattgagtcctcctcctcttcttctttttattaatttataaagaaaagaggtttaattgactcacagttccatatggctggggaggcctcgggaaactctcagtcatagcaggaggcaaaggggaagaaggcaccttcttcacaaggcggcaggagagagagagctcctgttcttttttgtcataaagtctacagaagtgcttatacttcaggacaagggcaggcagagagaaggaaggacattgcttcaccccagccctcactgacgagtttgctaggggacctcactttgtcccagagtaggggcagaactctggccactacccattcagaaggcctgggctgcactgctagttcctcactaactctgtgtggccttgggcaaggttgggcctgtgttaacagattatgaccctgggctctcaagctagaggatctaaatttgaatcctggctctgctaaagcaattagtgatgtaaactttaatgggtcagttaaccttcctgtggcttagtttgctcatctgtaaaatagggatcataacagtatcaataccacatgattgttggacagattgaatcagttaatgcaggggaagtacttagcatgacacgtattcactatcatttcctggagtaagagctgtgtgtgagtgggtgtgagcatgtgtgaaaccttttctctgcaatctcagttaagaaaccaatccagaatttaaagttcagggcctaaatgggtggttatcttctcccagttccatcctatcccacctttgctcttcctcccgcccacaggagctgttggtccttgattgggctggaagacctggtggaccctaagtgatctataagaggagaatagagaacagggaatgtcttcaaaaatcctagagggacacagaggctgagaggcaggcagtcctgcaggggtcttctgattgggacaaggagaaccttggtcttcacaggccaattctggtcagtttcccccatggacagatgaggaaacaggcccaggaatatccaaggtctcacacttcccatctgtcaagtcttgttgattctgttgtattcatgtctctcaaagggagatagagtttagggaagaaagaaggatcaactgtgtctgataccactgggagcttaagtaaagggttcttttacttcatagcatttatcccaatttgtaattcagtattatttgtgtggctgtttggtgtctctttctcctatatgagtgctagcttcataagggcaaggattttgattctttaatatttagtgcttgccacatgccctgaacacagcaggcatacaggctaaccaacatacagtggcatgaaagtcatgaaagtgagacacctacctcctccagtgccaagagagcataaccatgcacctgtcactctcctcaacaccacccccaagcatgaggcccaaaagcattagctaatcccctcctccagccactaaaacttaaaggccaggtgtggtggctcccatctgaaatcccagaacttcaggagacagcagcaggaggatcacttgaggccaggagtttgagatcagcctgggcaacatagctaggtcccatctgtactaaaaattagctgggcgttgttgcatgcctgtagtcccagctactaaggaggctgaggtgggaggatcacttgagcccaggaggtggaaacaacagtaagctataatcacagcactgaactctagcctgggcaacagagtgacaccctgcctcaaaacaattttaaaaataaataagagcaaaacttagataccacgtggtcaccccaacatgcaaaatcaagttttcccctactgagaagaatggggacttgacagctgagttacagagagataatcttcttcttcttttttttttttggtttacatcctcaagatcatgacttgtgaaatttgaatcgaatacacatgtaattccagagcaatgttgcctccgcataccatcagcaattcacttggctactggaagtcaggataagcttcccagaagagaggtaccacttgggctaccaatataaaaggatgaaaatatcagagtgatggtgttctttacaacgttgagtccctggacagcctgtccactgatgctgatatctgagcctaatgcttctctgaatgttgagattgaactttgatccaatgaaactagaacgagaaagaagataagtctttcattgttgataaggacattatgtttctcatacttgtatgattatttttccttagctgtactataattatctgcttatttgtctctgctctatgtgcttagggtacaaagttgaccaagaccaactttggttggaagcatagtactaagagcacagtactgagagcacagtattgagagcacagctttaaaaaacatgatgaaggctttaatacaggaaatgagcaggggagaggcatgtggtggttggatgtatcttccttgacacagtcagtgcagctctcagtagtcaagtccctacatgttagaagatgttaccttctgtggaattaagtggcagaacttgccttcaattattttcctttgcagaacaacaccaactgcattagttaggacacagtgctggctgcatttaagtcccaagcgatgattagtctctcactgttggtatagattcaaaccaatcagaccacctcctaaagtttgtagggcaggtaaatcctcatcttagaataaaaatcatcttaccaagtatgtgttttagaggcaagaagaaaacatatttgtttctgtaagagttttgtttaaaaaaaatataagaaaggctctcggtttaggtgaggtaatgaagttgttgatagttatcagatgacactggaatctttacttctctgaatgtgttctgtgcatctctcagtgtgggaacatagagagggagatcctccagcaatgccactgatatggtcagaaactgcatctttctttctccctgctgagatgagatggagtcctttgttctagaagacccatggtggtgccgctgggagtaacccttgagacaggaacacaaatcccaaccaatttgtggttgcagccttgagtctcactatttcccatagtgatgcgtagcagggaatggcaggtgcaccagagcaggagaggacctaatatctcccttcctgttagctttttataaagttttattgtgatcagtagcagttgggaagctacttgcagtcactgagcctcagtttctacatctgtaaactggggatagtagcatggcccctacttaatgtgctcagcaaagccactgaaaggagacagaaatgtatctaaattccctggacttttatcctacctctcttggggattgtcaccaccttcccatgtttgtcctttttggtttgatgcttgctgtcacttctttccttaggtgcctctctgtacggctcttttatcccagggattccagagttacagcacatgcataccaccatccaagcatgtttatttgtctcctgcttcactaggctgtccccaaggaacatgtggctcccggcacacacctggcacaacactgcacatgacattcacccacttggccttgaatctgacaaggaatctggcatgatgttcacccactcaggccaggtgccgagcagccctggaggcttaggggccagagggatgggaaaaggtgtctttctggggtgagtatcagtttctgcaggagggctgaatgtgagaaagaataaagagagaaggaagcgaacaagcacagcttaaacatcgcctatttctattgagttttaagaacgctgtgattttgtttgtcatgcaatccattcatcaggccaggcagacacagaacttgggtgtgagtgacgataatgagctgatataattttcacaccctcatcactgagatctctcccatcaggaatgggtcagggagctcacaggtggcagcaactgctattacaggcctcatctctaccagctcctggggcctgccctcctcccattagaaaatcctccacttgtcaaaaaggaagccatttgctttgaactccaattccacccccaagaggctgggaccatcttactggagtccttgatgctgtgtgacctgcagtgaccactgccccatcattgctggctgaggtggttggggtccatctggctatctgggcagctgttctcttctctcctttctctcctgtttccagacatgcagtatttccagagagaaggggccactctttggcaaagaacctgtctaacttgctatctatggcaggacctttgaagggttcacaggaagcagcacaaattgatactattccaccaagccatcagctccatctcatccatgccctgtctctcctttaggggtccccttgccaacagaatcacagaggaccagcctgaaagtgcagagacagcagctgaggcacagccaagagctctggctgtattaatgacctaagaagtcaccagaaagtcagaagggatgacatgcagaggcccagcaatctcagctaagtcaactccaccagcctttctagttgcccactgtgtgtacagcaccctggtagggaccagagccatgacagggaataagactagactatgcccttgaggagctcacctctgttcagggaaacaggcgtggaaacacaatggtggtaaagaggaaagaggacaataggattgcatgaaggggatggaaagtgcccaggggaggaaatggttacatctgtgtgaggagtttggtgaggaaagactctaagagaaggctctgtctgtctgggtttggaaggatgtgtaggagtcttctagggggcacaggcacactccaggcataggtaaagatctgtaggtgtggcttgttgggatgaatttcaagtattttggaatgaggacagccatagagacaagggcaagagagaggcgatttaatagattttatgccaatggctccacttgagtttctgataagaacccagaacccttggactccccagtaacattgattgagttgtttatgatacctcatagaatatgaactcaaaggaggtcagtgagtggtgtgtgtgtgattctttgccaacttccaaggtggagaagcctcttccaactgcaggcagagcacaggtggccctgctactggctgcagctccagccctgcctccttctctagcatataaacaatccaacagcctcactgaatcactgctgtgcagggcaggaaagctccatgcacatagcccagcaaagagcaacacagagctgaaaggaagactcagaggagagagataagtaaggaaagtagtgatggctctcatcccagacttggccatggaaacctggcttctcctggctgtcagcctggtgctcctctatctgtgagtaactgtccaggctcctcttctctgtttccttggacttggggtgctaatcaggcctctctttcccttatctgttttgaagatcaaaaaagatgttcaggccgggcgtggtggcttacacctgtaatcccagcactttgggaggctaaggcaagtggactgcctgaggtcaggagttcaagaccagcctggctaacatggtgaaactctgtctctactaaaaatacaaaaattagctgggcatggtggtgcacgcctgtattcccagctacttgggaggctgaggcaggagaattgcttgaacccggcaggcggaggttgcagtgagctgagatcatgccagtgcacttcagcctgggtgacagagtgaggctgtctcaaaaaaaaaaaaaaaaaaaaaaagatgttcaaggagcagtagcttaagtgttggatgctacaaacatatagaggttattgtagatcttatgcagctctataaaggaataaataagcatcttccccatccatctttagtggcaagaagggttttgggatagcattgattgaggatgatctacttgacaatagtttggacccaaggaggataaggaaggaaagtagtgacggatctcattccaaacttggctgtggaaacctggcttctccttactaaactagaatttggattttacattttcccctttatgttgcagtagaagaggatgaatcctctcactggtgggatcctgccatcctagagcaggtagagagaagagtcactccccactgtgggtagtggaggcttctcacatgtcacatttcacttctacctcaatttcactcttactaagatttgggaatcataatgacaggaaaatagaaaatataaacctcattttaattctttcacagaaaggttagaaattcagtgagttgtggcaacatattttccatcttctgaccttttaacactaattgatatggcttaaattcattctattttaaaccagatttttttggagatagtctatttccaacatgttccttctaggtgacaaatgagggctgttagttcagtatttgttacaataaatgtgtgtaaaataacctcacctttccagaatcatgtcaggaatatgaatctaatgcacaaatgtataactctatgacaagattgcatatatcttttaaaatataccttcccaacgttcattttaatacccctatttcaaacaaacctgcttagcaggttatgttaaacgctcagggcagaggagtaagcaagactgtgagccagtgatgacagcaaaagcatccaggtaggatcaaaatggagtaagaaaatattcctcatccctcagggtagaactccaaagagatattcatgggtcctggccccgtagtggaggtcactcaaaggacaaacatgtttgcatctcatctgcttgaagcctggacacagaggcaccatctgtgtcactctgtgtgtggtctgccatgttgtggggtggtcactacagactcaggcagctgggcagacaataccttagccttagatgatgctgatgcagcccaggagtcagaaactgtagtgcagacaatgccctccttaggccaacacaattaagtgcaatagatgactggcttttctgttagcctcttcattggaaccaaaagcagcattactctaccaaacagaggggagctggaaagaaactacacagtttgcccagcctagcctctgccttgacacggaaccatgtgagtctagacattcacctagatcattccttggggaccaatgctgctgacacattaactcaatagtttgtcctggcctgagaggtcatgtaacttgtagaaagtttagaagcagagattagtgtcatttatttgccatggctgtgacaacaaaggaaggaacaggagtgggaaaacccaaggccaccctggttttggtagatggtgcacacgcttccactaactgttctggggcaaagatccaaatgcactattgggcctggctatgctgcttctgctgggtcccccaaacatgagcctccacgccatttctcagttgtattttaccacatattatcacagtcaccggatttgtacagaatatttggaacctatactgtcttaagggctaccctttaaagaagagaaaacaaggttttaattcaactgtctggaacattttatgtttacttatgtggaatactacatcttttgttataaacaggagggaatgtggacattcgaaggcccctaccttttagctaaaagcccatatgaagcatatggatccatttatacacaccatgcttttcagctacattttcctaatttgcctctctggggccaaccttgtgggactagcagattcatggttgagttgaaggatggtgacctcttccatcagcttttcttcttcctccagtcttccaaccctcagtaacatcagactgggaaggtcttcagacatccagaaaccccagttcggggagttcatacatgacccatcaaagatgagttgcaagcaggcctgccttagggagcaccagccttaatgggttttcctacagagatagttgatgggcagatgcaataaactgactgctttgtgattgaccaccttgagaaaaattagcatgtctggctatgttagtcttttcttgcattgttataaagaaataccagagtctgggtatttataaagaaaagggatttaattgtctcatggttctgcaggctgtacagaaagcatagtgacttcttcctctagggaggtctcaggaaatttacaatcatggcagaaggtgaaggagaagcagacagatcttacatggctggagcagaagcaagagaggctggggagaaggtgccacacattcaaaccaccagatctcataaaaactcattgtcacgaggacaacacctaaggcgggatggtgtgaaacgatgagaaactgcccctaggatccaatcatctcctaccaggccccacctccagtattggggattgcatttcaacatgagattttggtaggggcacagattcagaccatatcactggcactgtgctaatcagatgaatatcaccagttggaaggctagattccacaagaggaggaatgacctggaaattggttctttagttgtgattcttctgcacactgtcattcagggaaatatgagtcaatcatccttcccaataggtcaaatcaaccagatcatctgatcacagagactgaggtgtagctgaaagctgctcacatttctatgaggtcaatggaagccttgagcacagttgtcaatctgtagaaataaggactctgtgactcctccaagacctctctgtgaatgacggtttaagaagaaccagatcctaaaacagggtcagagcttagagggaagggaaagcataaaagcctctgagcaaattctaaagacagggtcaccataggctctcagtgaccctctgtgactgagtggctgcagtgatgcaaaatctcatcatcactgcggaagacaaaaaaatgtcaccctttctacctaggatgagaatccccaaatttggggagaggccacttactaaatagacgtaaaggaacaaagtgacctggaagaattcctgcctgaacctctcaggatcattcacatttgagaacatttatcaaatattcattccaggactgggaccatgaagacttcagctgctttgagctaatcattgtaactttttggtgtctcatggtggaggcaggaaaggacctgatgaacaaatataatcattgccgtcagagttactgttattatttcttgccttaatgttacctcgttctcttgagcattccagttcctcagtcaatgactcatcaacccctatatctataaagtcacaatcgctgtgacttgatttctgtttcactttgtagatatggaacccattcacatggactttttaagaagcttggaattccagggcccacacctctgccttttttgggaaatattttgtcctaccataaggtgagtgtttttgagctcactcttttgcttcttatgattgccaagagcagcttagttccatcagtaaaaatgcttctcctcagggggaaggtctgaagttttacactttcagaaacagtgtgtaggcatcacccagaacatggcaatgtttacccaagggctctcttgctaactctcaggaacctcaggtttgcctcagttgaacagcccaaatctcaggtagatcagcaacctgatgctcagaacttgatgtgcaaactttgtgagcgccataaagaaggttttctttttgctctatgcaggttcccaggaaggtacagtcatacttagttagtattaaaagtaggaaaaggaccccctgattgtgacttgttatctgtgtacatgagagtcaaactttcctctctgtagcaagagctcttgagtagccttttttcccttccttctggacagctttgaaactcaatttattagggagcccaggtatttacctttgggtcatttgcacctgcttcaatcctctccgaaaaatgctaaattccctgagggtatctccatggctctaccccagctcttactccccatgacatcttttgcagctttgagagacagaacaaaggggttctgctttatttcttttccttcaaaggctgcaccttatgggtgagactgatcacagactggatataactgagatgagacagtggtggtcaatcaaactcagatatttaagcacaaaatgagtttgtggggttttttttttacacaaaggcggaatcacatgcaaaatcactagaaaggggatgatttgatgaaattattaaatatttaattttgctgaatagaatataatatgtgccacgtggaccgtgaactttggccgagcctttgtgcctaacctagtctgatgctctgcccagggtctgggccctggatggaaaattaggagcccatgtccacatggccagccgcagcagtcagctctttggcttacatcatctttcccacatacctgaggcttgtttctcagattctaattctctcaggtgagggctttgttgtctaattactatccaggaatttcatattttttccctgtgcaaaagcaataatttccccgccaccttttccaggtcaactctttagtagatgtacccccaagatgcacattcctgggacctttgtttgcacagttaaaatgtcacccctgaaatgtcgatacaggaaggtttgtttttaagtttcagtgaaaactctgagcaagtgttgtaatttgctgtgtccgatgtgtagaggggacattttctcagaacttccatgttaagctggaaaactggaaagtgagttcactttgtcattctgtcactcgttcattttctcactcaacaacatgcctcatacttacctaaatctgctagactaaaggagttccctggtgtctgtaactttccaattctgctagaactctagagcgagctcatgaaataaatgaaaaggatgacaaagagataaaacactgtgcattctcttctgatgctaattcactttcccttggcctcagtttccccatgtgcccctggaggtgatcattcagggattcatgagattttcaagacaacacatgaaaaagcaaaaagacatcagaaagacaaagaggtacttagtatttatacacaaggataagtcattcagtatccacaacacttggagagaattcaagagtgattttaaatttcccttttcaaatacctcctctgttttctcttatttcctttatgacgtctccaaataagcttcctctaactgccagcaagtctgatttcattggcttcgactgttttcatcccaattagaggcagggttaagtacattaaaaataataatcaaatattattttgtttctcctcccagggcttttgtatgtttgacatggaatgtcataaaaagtatggaaaagtgtgggggtgagtattctggaaacttccattggatagacttgtttctatgatgagtttaccccactgcacagaggacagtctcagcccaaagcctcttgggatgaagctcttgtcaacctaactacaaacagagagaagttctctgaaagaagaagatatttatttgggtgtagagtattgcaatgggaatctgcatgcctttataaactatgtgcaaattcagggaagtaaagcaagacaaagaggctccaaggaaaatatgaggaggatttcttatcagttttgaaataattatccttcgctacaaagatcagtaacaagggtgacgcctcaccaaggttggacaggcagttgctgggcaggtgtccttgcagaaatattttttttaatgttgggatggcctttgtgcaagcttgtagttttgcggagtcttttgtgatagttttgttatcaggcacacaagcatgagaatcctctcttcatagccttctttgatttatttgtcagggtttttacacacacacacacacacacacacacacacacaactagtgacatcattttggttctaacaacattcacactggttattgtaaaacttttcgaaggttgtcctaccaaggatcccatgtgtcaccaggtgtcaagttctacagtctgaactaggctgggagcattgtgattacttttctccagactttggtggcccagggactcacagcatcatgctctgtccagtgtctgcctattcccctcttctttttttttttccttaggtgcccttttattacatgtgttgtctcagacccttctaatatgtgctcataaatacatcatatcatctccttcccacatcaattcactttcaattaaaagccaaaactctttcatttagactttggatttaaagtgcttttgaatgaagggttgagagataatagagaaatagattggcaaaccatttatactctgctgttgttgttttttaattttatctgcaagtgtggaacttttcattctgttttgttattaaatttaagccaagactttttaatagaagggtatataagcatttctttgtctataccttcctgctgaatttgaagaaatgctgaatattcttaaccactggcgggctgatggactgtgattttattttattttttatttttagttttttaaattatactttaagttctgggttacatgcatagaatgtgtagttttgttacataggtatacacgtgccatggtggtttgctgcacccatcaacctgtcacctacattaggtatttctcctaatgctatctctcccctagccccccacccaacaacaggccccagtgtgtgatgtttccctccccgtgtccatgtgttctcattgttcaactcctacttaggagtgagaacatgtggtgttgagttttctgatcttgtgatagtttgctgagaatgatggtttccagcttcatccttgtccctgcaaaggacatgaactcattgtttttttatggctgcatagtattccatggggtatacgtggcacattttctttatccagtctgtcactgatggacatttgggttggttccaagtctttggtattgtgaatagttctgcaataaacatatgtgtgcatgtgtctttatcatagaatgatttatgctttgggtatatgcccagtaatgggattgctgggtcaaatggtatttctagttctagatccttgaggaatcaccacactgtcttccacaatggttgaactaatttacactcccaccaacagtgtaaaagtgttcctatttctccacatcctctccagcatctgttgtttcctgactttttaatgatcaccatactacctggcatgagatggtatctcattgtggttttgatttgcatttctctaatgaccagtgatgatgagcattttttcacatgtctgttggctgcatagatgtcttcttttgagaagtgtctgttcatatcctttgcctattttttgatggggttgtttgctttttttcttgtaaatttgtttaagttctttgtagattctggatgttagcccttcgtcagatggatagattgcaaaaattttctcccattctgtaggttgcctgtttgctctgatgatagtttcttttgctgtgtagaagctctttagtttaatcatatcccatttgtcaattttggcttttgttgccattgcttttggtgttatatttatgaagcctttgcccatgcctgtgtcctgaatggtattgcccaggttttcttctaggatttttatggtcctaggtcttacatttaagtctttaatccatcttgagttaatttttgtataaggtgtaaggaaggggtccagtttcaattttctgcatatggctaggcagtttcaccaacaccatttattaaataggaaatcttttccccattgcttttgtgtgtcaggtttgtcaaacatcagatggtagtagatgcatggtgttatttctgaggcctctgttctgttccattgatctatatttctgttttggtacctgtaccatgctgttttggttactgtagccttttagtataatttgaagtcaggtagcgtgatgcctccagttttgttctttttgcttaggattgtcttgtctatgtgggctcttttttggttccatatgaactttaaagtagttttttccaattctatgaggaaagtcagtggtagcttgatggaaatagcattgaatctataaattaccttgggcagtatggccattttcatgatatggagtcttcctacccatgagcatggaatgttcttccatttgtttgtgtcctcttttatttcattgagcagcggtttgtagttctccttgaagaggagaacttcacatcccttgtaagctggattcctagatattttattctctttgtagtaattgtgaatgggagttcactcatgatttggctctctgtttgtctattattggtgtgtaggaatgcttgtgatttttgtaaattgattttgtatcctgagactttcctgaagttgcttatcagcttaaggagttttggggctgagacgatggggttttctaaatatacaatcatgtcatctgcaaacagagacaatttgacttcctcttttcctaattgaatatccatttctttctcttgcctgattgccctattcagaacttccgacactatgttgaataggagtggtgagagaggacatccttgtcttgtgccggttttcaaagggaatgcttctagtttttgcccattcagtatgatattggctgtgggtttgtcataaatagctcttactattttgagatacgttccattgatacctagtttattcagagtttttagcatgaaaggctgttgaattttgtcaaaggccttttctgcatctattgaggtaattatgtggtttttgtcattggttctgtttatgtgatggattacatttattgatttggtattttgaacccagccttgcatcccagggatgatgctgacttgatcctggtggataagctttttgatgttttgctggatttgatttgccagtattttattgaggattttcgcatcgatattcattagggatattggactaaaattctctttttttgttgtgtctctgtcaggctttggtatcaggagatactggcctcataaaatgagttagggaggattccctccttttctattgttcagaaaaatttcagaaggaatgataacagctcctctttgtatctctggtagaattcagctgtgaatccatttggtcctggactttttttggttggtagcctattaataattgcctcaattcaaaacctattattggtctattcagagattcaacttcttcctggtttagtcttgggagggggcatgtgtccaggaatttatctatttcttctagattttctagtttatttgcatagaggtgtttatagtattctctgatggtaatttgcatttctgtgggatcagtggtgatatcctttttatcattatttattgcatctatttgattcttcttttttctttattagtcttgctagcagtctatctattttgttgacctttttcaaaaaaccagctcctggattcactgattttttgaagggtttgttgtgtctctatctccttctgttctgctctgatcttagttatttcttgtctcctgctagcttttgaatttgtttactcttgcttctctagttctgttaattgtgatgttactgtgtcaattttagatctttcctgctttctctagtgggcatttaatgctataaatttccctctacacactgctttaaatgtgtcccagagattctggtacattgtgcctttgttctcattggtttcatagaacatctttatttctgccttcacttccttatttacccagtagtcattcaggagcaagttgttcagtttccatgtagttgtgtgattttgagtcactttcttaatcatgagttgtaatttgatttcactgtggtctgagagacagtttgttgtgatttcttttcttttacatttgctgaggagtatattacttccaattatgtggtcaattttagaataagtgcgatgtggtgctgagaagaatgtatattctgttaatttggggtggagatttctgtagatgtctattaggtcctcttggtccagagctgagttcaagttctgaatatccttgttaattttctgtcttgttgatctgtctaatattgacagtggggtgttaaaatctcccattattattgtgtggaaatcttagtctctttgtaggtctctaagaacttgctttatgaatctgggtgctcctgtatttgggtgcatatatatttaggatatttagctcttcctgttgaattgatcccatcaccattatgtaatgcccatctttgtctcttttgatctttgttggtttaatattctttttaaaataaaatattttaaacatatgaaacattatggagaatggcatgggaaatatccacgtatgcaccacccagcttaacaaatgctctactgtcatttctaaccatggtctctttgaagagctcttttgtctttcaatgtctcttccttgtttggcccacattatccttcatcatatgaagacttgggtggctcctgtgtcagactcttgctgtgtgtcatacctaatgaactagaacctaagattactgtgtattgtacaactaagggattatgtaaagtcaggatcaaagtctggcttcctgggttgggctccagctgtagaataaggctgttgatgtttaatcaactctgtttttttcacacagcttttatgatggtcaacagcctgtgctggctatcacagatcctgacatgatcaaaacagtgctagtgaaagaatgttattctgtcttcacaaaccggagggtaagcattcatgtgttgaaattaaaatactgattgattaaatttatattttgaaattcttatatattcatagacagttgcctaaaaaatgtccaggaaggttccacgtccacttcatcctgtcccccccgaatggtaacatcttgcaatcttgcataactataaatacagtatattcatgttactatatagtacaggaaattgacattgatacagttcacagagcttattcagatttcaccagctttatgtgccctcatttctgttctatgcaaatttatcacaatcatagatttgtgcaatgaccagcatgatcaaaacgcagaacccatttgtgttctatacaaatttatcacatcattagtagatttgtgcaatgaccagcatgatcaagatgcagatccactctgtctccatgtggctccctcctgctatcctacagtcacaagtctttttctctgacagggtccatatcagagcaaactattttttattttgaggtgatcaatgtattaatatttccttttctggattgtacttttggtgccatgtttgaaagttctttgcctagccctccttcctatattgctgtttttttctaaaagtcataaagtttaatgctttactaaatgtagctctattatcaattttgtgttattttttgtataaggtatgagatttagatcaaggttcattttttttgtggcttatggctgtccaattcctccaacgccatttttggaaagatgggtatattgttaaaaatcaactgggcatacttctttgcatctctcacgtactactgtgtcccattgatcactgtgtttattattccaccaataccacactgtgttgaccctagtagctgtacactaactcttaacctcgtgtagagtgattcttcccacttttattgacttattttttcagatttgttttaactcttcctggtcctctgcttttccataaaaattcagaatgagtttctcagtgtctacaaataaacgtgctgttattttgacaagaattgaattaaatatatagaccagtttatggaaaatgtgtatctttactgtttgatctttcaattcatgaacatagtatgcctctccatttccttagattttctttgattgcttttaacatcttgtagttttcagcatagagatcctgtacatgttttgttagatttacagctaaattatttcatttttgttggaatgactgtaaatgatattatgtttttcttgtattttcagatattgattgttgttacatagaaatgtgctttgattttgtgtgttgatctggtatcctagaaccttgcagaactgacatagtagttctagaagtctctttgtatatgccttgagattttacacattgtcagttatgtcacttgaaaatagagacaattcttttatttcctttccaatctgtatgccttttatttcttttcttttgtctattgcactaggacttcccagtataatgttgagtaaatgtggtgaatttttgaattgttcctaatcttaggagggaagccttcagttctttcatcattaagcatcatttagatgaagtgggctgtttttttgtagattctctttatcaaattgaggaattttctctccctagtttgctgagtttttatcataaatgaatgctggaagtactcattataaaaaaaatggctatggaagatgaaagaaagtttcaagcatgttggcttgataggccagttccaagttggcaaaaataattatctcttttttctttctatccatgaaataaaaaattaagagacaagaatgtttatggaattgcattatttcttcaaaatatgttcctagttttaaaggtattacctactattttttttaaaaccatcacattgaggcacttctttttcacgttgcccatgctgcaggagaacataaagacagcttgtctgaggcaacatacaatccaccaaagtcacctgcttgtctgtctccactccgtctctacactgcagaagtgctaggtcttgattctgtttattgtactggaagaacacattctctaccacgtggataatttgcatgtaaaagaagactgggatatagaggctggagacgacatcagggtctcctgaacactgccgccacccccccgccccgccccacacaaatacatcccaggacactgggcatctgggataaatctctattgagcatctagcatagggcccatcacccagtagacagtcactaaatagttgttgaataagtgttcctgtttaacacattttctacaaccatggagacctccacaactgatgtaggacaaaatgtttctgctttgaactctagccttttggtccagtgggatttatgaaaagtgccatctctatagctgaggatgaagaatggaagagattacgatcattgctgtctccaaccttcaccagtggaaaactcaaggaggtatgaaaataacatgagttttaataagaaacttaaagaatgaatctggtggggacaggtataaaataagatcacagtccctttccaaggggtagtccactgaatttgagctgcctaaaaatggtcttttatctttatgtacagaaaacacatcacaaaattcattataaaatgtcacttactgctccatgctggggaaagccatgtccttctgggactagagtctgcacatttaactatgggtggtgttgtgttttgtgcttagatggtccctatcattgcccagtatggagatgtgttggtgagaaatctgaggcgggaagcagagacaggcaagcctgtcaccttgaaagagtaagtagaagcgcagccatggggttctgagctgtcatgaacccctccagctgcctgccatggagctgatattcctgctgttgggttattccagtgaccagacaaaaggagggctgtggtaatgcaacttcaatgggtctcccaagatggggcagctccgatgaggaggtggggcagctggaggaaaaggatcttctcccctgtgcacaggggccagggtttacatatccattaaattgtcaccttggatattctagaagactaaatatatcctttagggggaaaaagtgtgattgtaccaaagttttaagcatggagtgtatgggatggtggaaggggaaggcacttggtatctgttggttggcagtgagtaggttgggagagttataatggagaacttagaataactttgatcatttcatgtttttttctgaggatatcagtagaatactaaatattaaaattcctaccatttctttttcctccagtctcaaagagagagggtggtaaaaacactataggtagggcaagcctattatttgctatctacacttatgcagtaaaaacaggtgtaatctgagtttgtcctgggcagaccagggatatgtggtcactcactatagaaatttccaaatcaaattttgagagatttttttttaaccaggacattattggtcattatattttacaaaaataattctgctgtcagggcaacctcagctcaccacagctggggatagtggaattttccaaagcttgagcagggagtatagagaataaggatgatatttctaggagctcagaacagggtactgttgctttgtaaagtgctgaagaggaatcggctctgggcatagagtctgcagtcaggcaatatcacctgtcttgagccccttaggaagagttaattattctactcttgttctgctgaagcacagtgcttacccatcttgtatcatccacaatcaatacatgctactgtagttgtctgatagtgggtctctgtcttcctatgatgggctccttgatctcagaggtaggtctaattcagttcagtgtctccatcacacccagcgtagggccagctgcatcactggcacctgataacaccttctgatggagtgtgatagaaggtgatctagtagatctgaaagtctgtggctgtttgtctgtcttgactggacatgtgggtttcctgttgcatgcatagaggaaggatggtaaaaaggtgctgattttaattttccacatctttctccactcagcgtctttggggcctacagcatggatgtgatcactagcacatcatttggagtgaacatcgactctctcaacaatccacaagacccctttgtggaaaacaccaagaagcttttaagatttgattttttggatccattctttctctcaataagtatgtggactactatttccttttatttatctttctctcttaaaaataactgctttattgagatataaatcaccatgtaattcatccacttaaaatatacagttcagtgatttgtagtacatttgaagatatgtgtgaccatcatcattttaaactttaaaactttttttgtcaatctagagacctcatacatttttagctatcagccccctgtcacaaaccctgtcatcatatgcaaccactaatcaactttctgcctctatggatttgcctattctggacacttcatagaaatgatattaattcatcagggttttttattctctagttcatgaatttgtactttagtctgtatcattttctttcttctgctggcttcaggcttagtttgcccttcttcgtttactatgttgtggcatgaacatagattactgatttgtgatttttttgttcctctaaatttagacattacagctgtaactttccctctgagcacttcctttgctaaatcccatgagattgtggcctatcacatcttagtttttgttcacctcaaaacagtttctatttgcccttttggtttctactttgactcattggttacttaaatgtttattatttaacttccacatatgtgtgagtttctcaattttctttcccttattgattttatctttattccatgataggtgacagagatatgctgtgttatttctatcttgactacctactatttcttgaacagcaagattaattttgagcttcagattatgatttgggttattctaggagactgtagtccaatagataaaggcaaagagattagggcattgaattttgttccttttatccttcaaaagatgcacaaggggctgctgatctcactgctgtagcggtgctccttatgcatagacctgcccttgctcagccactggcctgaaagaggggcaaaagtcatagaaggaatggcttccagttgagaaccttgatgtcttttactcttctggttggtagagaaaactagaattgctccaggtaaattttgcacattcacaatgaatttctttttctgtttttgttttgtttttcctacagcagtctttccattcctcatcccaattcttgaagtattaaatatctgtgtgtttccaagagaagttacaaattttttaagaaaatctgtaaaaaggatgaaagaaagtcgcctcgaagatacacaaaaggtaaaatgtggtggtagttataggaggatgtttagtttttcataattttttagataatatacatatgatcagtgcagttacctgtatgtttttaaagaatgcttttaacatgaagactgctcatgtttagagcaagagaattcatttggtagaaatgcagaaagtggggtttggggaaggagatatgagaatgagtcagagacagcacatgaaatttgatatcagacacaacaattagtatgccacggcataaattttattgagataaaactttaccactttacttcccttcaataaattgtcagaggataaacattactgtttggaaatatattttactgatattatgctttccccagatcataaattggtaaagactcatttcaagtacaaacctgttattttacacattctcaaatgaaagtccctatcaggccacctgctgaagtgtagcgtgtgttaaatttgagccatctcacatgatagccagatttgtttcaggaaaacatcctgctttccaaggatttagaagggtatgtttttcactggtgattcaggcaacatgcatcagatttctggtcttcaaggagccatattctcagaagggagatcaaggaccacgcttgtgatttacttctgacttcaggagccactttctgtcagtgaaatttctctttttgcttctagcaccgagtggatttccttcagctgatgattgactctcagaattcaaaagaaactgagtcccacaaaggtaaccagagtgtttctgagggctacttgtggggcactcagagggaaggccttgttctgaaaatgtgcaggaagtattccaggatgatgagaatttctgccacatagcagaacgacacatgtttgaatgttataagtggtagttggaggcactttctagaggcatgcaggcatagatagccatgttctaagagtaaagggcaaccctaagcaaacctggcatgctagaaagtcagtctgcggtctgtggatcacctacatcagatcaaatgccaattctcagcctccttcagatccactgaataaaaatttctgcctagaaatttattaggttgctgcaaaattaattgtgggtttttccattacttttaattgcaaaaaaatgcaattaaaagtaatggcaaaaaccacaataacttttgcagctacctaatacatctaacatccaatcaggagccacgctgttccaaaaggggtgattttaactggcagtacttgttgaaagtgtgttcaccaggttaatctactgcaaagttattttccactttggaatggattagtaacttgtggggaaaacctctgagaccgtgtaaatatcctctttgtcttcaatgtttcacctacgagttttacaacccatgtatgttttttactgaagtcactattactatgacagtggcaaaatgatgaccatggtcaattacaagccaccaagacttggcaaccatctcacaaaattcctgaatatttaactattggttctagagagcaggactgggcttactccagcatactgctttaaatatatccatgtctacatccacttttgtctgtatgtctatgtatctatctatgtatctatctagctatgtatctatctatctatctatcatctatctatctatcatctatccatctatcatctatcatttatccatctatcatctatctacttatatattatctatctatcatctaactattcatctatctatcccaatataacttgctgtgataaaggaaatagtctattgttttactgtttcatatagaaatcactagacacatatggctattgagcactggatatgtggctagtgccattgaagatcaattttaaatggtatttcagtttaatttaataaaatttgattttaaatagccactagtgggtagtggctaccatattggacagcagagctctaaactttgagattatagttcaatttcacatcagtatcatcaggttcatgataactgaatactatgattaggtagttgaatttacttataactgcatcacagaagtcttcactggtaaatcacagctctgtcgacctttctcacactcctttcatattggttttggttgtgaattacatggttggagcaggcattatatttatttctatgttccaggtctctaaaggtcctaatccagtcctgatcaaacagaccagtgatggaccatcctgagcttctctcaggagaaaaatcaagaggggcccaacttgtaatcataggagcttatgctattttaatgccatccatcagactacaatcaattaccactcatctagctttttgtccatctctcattcttgtacatcctgagatagtcaattctgagaactgtagcctagatctatcacctgatgcctctcaaagatataatccgtgcttctcaagctaggctatgcacacaaatcactgcatcttgtgaaagttcagattttgaatcagtagttcaagggtggggtttgagattttgcatttctaatgagctctcagatgcttctgacccatggaccacactttgaataccaagaagtggtctgtagaccaatattggtcccttaagttccctcaaacatatcttcgggaaacgtcctttgattttccctacatttaaccattagtgttgcaaattctctcaaagtttgtcaagatatattgtagctaaaataaattacatttttcttgggggagagtactacctcatattaacttacaataaagtacttttaggatcattcaaggaacacacccataacactgagtatgttatgcggaaatgctctctctggaaattacacagctgtgcaggtggcgggggtggcatgaggaggagtggatggcccacattctcgaagaccttggggaaaactggattaaaatgatttgccttattctggttctgtaagatacacatcagaatgaaaccacccccagtgtacctctgaattgcttttctattcttttcccttagggatttgagggcttcacttagatttctcttcatctaaactgtgatgccctacattgatctgatttacctaaaatgtctttcctctcctttcagctctgtccgatctggagctcgtggcccaatcaattatctttatttttgctggctatgaaaccacgagcagtgttctctccttcattatgtatgaactggccactcaccctgatgtccagcagaaactgcaggaggaaattgatgcagttttacccaataaggtgagtggatggtacatggagaaggagggaggaggtgaaaccttagcaaaaatgcctcctcaccacttcccaggagaatttttataaaaagcataatcactgattctttcactgactctatgtaggaaggctctgaaaagaaaaagaaagaaacatagcaaatggttgctactggcagaagcgtaagatctttgtaaaacgtgctggctctggttcatctgctttctattactacaataatgctaagtaaaaaacctccaaaaacctcagtggcatctaacaataagcatttgttgctcacactcatttcacattggttttggttgtgaattacatgtttgcagcaggcaccatagtggtgtgtgatgtccccttagctgtatccacatatggacacaggaatttgctctttttatctctttttattttcttggttacagacatgtgacttttttttttgaaaggtaacaatcactttctcatatgttatttgatgctagtggtcatagcctattagtcacatttgtttcaatgagaaagaaaaaccagtacacggttatgctaaggatttcagtccctggggtgagagccgtctcgaatgtctccccacttcataactcctccacacatcatagttggatagtgagctctgctgatattggcaggacttgctctggtctggctgtagtctgacggagcctggccctgggtgtgctgtgcaggctgactcagctctccccacacctatctcatgttccagtcaggcagtaactggtgaagaagccaagctaggaaccaggatatctggctcctgagctaaagtcttaaaacactatcatattgccttccaaatataacaccaaatactaggtgcatatcacccacactgttttcagacctctgccaaaattgggattctttgtggtatgaagagacacggctttggggctggcccggctgtggcagtgaggtgaacacaaagggatgttcttcagagattacagtccagccctgaagcaacaactaggagactgtttcagcaagtgaggacagggctgtgtggggttctatcctctttataacttccactagcactgaaatcgtgttctctggttacatccaaccagaaccttctttgtcatttttgggatagaaagggactagtttatcctcaaattatttatggagattttatataatatagtgtttctctccacattttctgtatataacaaaagtcctccttttagtgtgtgtatacacatatatatacacatatatatgtgtgtgtgtatgtgtgtgtgtatatatatatacacatatatacacggttatgctaaggatttcagtccctggggtgagagccttcccgaatgcttcccaccttcataactcctccacacatctcagtgggccactgagcacagcaatgggcatgacagttattaaaacactttataaatgcttcgatcctttaccagtatgagttagtctctggagctcctaatacttcattagtactgcatggactgagttaaaagttaattcaaaatctcaatttatccaaatctgtttcgttctttccaggcaccacccacctatgatactgtgctacagatggagtatcttgacatggtggtgaatgaaacgctcagattattcccaattgctatgagacttgagagggtctgcaaaaaagatgttgagatcaatgggatgttcattcccaaaggggtggtggtgatgattccaagctatgctcttcaccgtgacccaaagtactggacagagcctgagaagttcctccctgaaaggtacaaggcccctgggaagggagccctccctgaaccagcctggttcaagcatattctgcctctcttaatctacaggacagtcatgtggttgtataattatttgcttgtatttttatatttagagatttttttaatcatcaaattgattattgtcacactttacaaaccatagactagaaaaaagaaaactacagtcatccacaattccaacaacttacgatgaaggtcatcagttatgtccttatgggtcatcagtgtccaaaatgtaaggactcttttaaaaacacatgatcacaatgctattattatgtcccccaaatgaatatttttttcataaatataatcaaatatttaggaataacattttaataaaaaacatgcatctaatcttcaaagaattttatagcttactggaacagatagacaaagaaagcagtgatgatactgcattacatcggtacagtagcatcatatgcctgtgtaaattatctgacttcaactattctatggaggtgtgggggagaaagagggagagatggagagaagaagaaggaggagaaggagggagaagacaaggtaaggaggagaaggaggagaattagaaaaacaagagaggagatgagaaggaaagtgcaaaataacaattttgaaatagtacaagacaatttccccttctccttcctcatgaccaatgtaagtgtgacttgaggcaggaacctacttttccatcagtcagtcccatcacttatgtgccttttatagtgtggacacatcaccaccctgaatataatttcagtgtttagaaataagtattctttgcaacactatttatctcatctcaacaagactgaaagctcctatagtgtcaggagagtagaaaggatctgtagcttacaattctcatagcaaaataagcatagcaggatttcaatgaccagcccacaaaagtatcctgtgtactactagttgaggggtggcccctaagtaagaaaccctaacatgtaactcttaggggtattatgtcattaactttttaaaaatctaccaacgtggaaccagattcagcaagaagaacaaggacaacatagatccttacatatacacaccctttggaagtggacccagaaactgcattggcatgaggtttgctctcatgaacatgaaacttgctctaatcagagtccttcagaacttctccttcaaaccttgtaaagaaacacaggttagtcaattttctataaaaataatgttgtattaataattcttttaactgagtggtctgtattttttaaaaagaatatgcttgtttaatcttttactaatttgttctctgggccaaagaatcaattaggcccatctgtgatctttaagggtgcttcagttctggagttcaaaagctgtagcatcaaaaacatcatgtaaagcccatgtagattagcatggcataattatctgcagtctccttgaacttgagcaaagtttacattcagtttcaagtcgattggaaagatggggaagtattttgcacagtcatgaagtgtaatgattaccttgttgtgacttttgaatgctgctcttcccaaccagaacttggagaagctttctcatgagagtggctcccaaccactagctgtacattggaatcaccagggagctttaaaaattcatgatgtctgggatatcacagaaattctaaactaatttgcccagagtgtggctttaaaagcttccccattgcttctcatgtgaagccaaggttgagaatgactaatttaaggcatttctggtggatataaaggactaccacagtccaaggccatcctgactgacctcaccttccaggtgcctagctccatccagctgggctccttttcaacccaattataactctattaatgttgttcccagccaggcatggtggctcatgcctgtaatcccagcactttgggaggccgaagcaggcggatcatgaggtcaggagatcgagaccatcctggctaacacggtgaaaccccgtctctactaaaaatacaaaaaattaccctggagaggtggcaggcacctgtagtcccagctactctggaggctgaggcaggagaatggcatgaaccccagggagcggagcctgcagtgagccgagattgggccactgcactccagcctgggtgacagcgagactctgtctcaaaaaaaaaaaaatgttgttccctttctcctcattttgttcttatctttcaagtcctagttcaatccccaagcccctccaaagtgtcttctcctcctagtccagggcccatttacttctctgctctgttattggatactggaggctattatcataaatttgacaatttgccattaaatcattgagttttattctctatattttctttgtatctaaaatgtcttcccccctccattaacaatatcctctcattttattcctttttaaaatatcccagtggtgccttgcaagggactgtatctaatgcaagcatttggtaaatgtttaaggagtgatgtgcagttgatggcttgcatacatatattaagctatttaatgtgaacctttaaacaaatgccattcgtgcatatgcatgtgtgtgtgtgtgtgtgcacatgtgggcatgcatgtctgtctgcagtgaaaatatattcagggtttttgaaaatttttaaataataaggtattatatttatagaaagatttgaaatattttctctgaagaagttaaagaacagacgtcattgattcatattaaacaataccctataaatcttatttctaggtctcatgtatttattattcaattccaccccttaagtaggctttctatataggagaggaagaagacagaaatagtttccatattatttccatattccatattatttgtggctttaggccagcagtgtagctgtattatatgtgcccagacaggggactcagccctgaataaaagtggtcctctggcacacctgggatggggaaggtactccttggtaagctcccaacctggcacttcttgatctccctggcaattttcttgcccattactccatggagatcagaatatcactctgttgtgtcccctcaacacggaaggagtgtctcaataagaatggggctaaaagttgagtccaaacactgtaggaattgagaggttccccacttgcactacccttggaagccaagagaagatgttaaaaaataaaatggtaatgcttcctgaaggtgtcttcccatctttacactggatgggttcaattgggaggaattactggactctggaagttgaagactgtccatataattaaaatgtacaataactacccaggtttaccttgcaagtttcaacatacacaaaattaactttatatgactcttcaaaaacagtttgccatcatacctaataatctggtttaaattttaaaaactcatccattttacttaaaatttaaatcaaaaaagaacacaggtttccatgaatttgtctcaggcctggcacagaatagtactccataaatattttgttaaatgatagatgatgaatgctctcactgtccaatcttcacacatcttatagactaagtataaagaatccaagatttatagtgctgaaagtagtttttatatgtttacaaagcattattgtcattactgcattttttttgcccattactccatagagatcagaatatcactctgttgtgtcccctcaacactgaaggagtgtctcactcactttgatgctatactttctacttttgtttatttaatgcttctcaatatgcttgtttaactgttgcagatccccctgaaattaagcttaggaggacttcttcaaccagaaaaacccgttgttctaaaggttgagtcaagggatggcaccgtaagtggagcctgaattttcctaaggacttctgctttgctcttcaagaaatctgtgcctgagaacaccagagacctcaaattactttgtgaatagaactctgaaatgaagatgggcttcatccaatggactgcataaataaccggggattctgtacatgcattgagctctctcattgtctgtgtagagtgttatacttgggaatataaaggaggtgaccaaatcagtgtgaggaggtagatttggctcctctgcttctcacgggactatttccaccacccccagttagcaccattaactcctcctgagctctgataagagaatcaacatttctcaataatttcctccacaaattattaatgaaaataagaattattttgatggctctaacaatgacatttatatcacatgttttctctggagtattctataagttttatgttaaatcaataaagaccactttacaaaagtattatcagatgctttcctgcacattaaggagaaatctatagaactgaatgagaaccaacaagtaaatatttttggtcattgtaatcactgttggcgtggggcctttgtcagaactagaatttgattattaacataggtgaaagttaatccactgtgactttgcccattgtttagaaagaatattcatagtttaattatgccttttttgatcaggcacagtggctcacgcctgtaatcctagcagtttgggaggctgagccgggtggatcgcctgaggtcaggagttcaagacaagcctggcctacatggttgaaaccccatctctactaaaaatacacaaattagctaggcatggtggactcgcctgtaatctcactacacaggaggctgaggcaggagaatcacttgaacctgggaggcggatgttgaagtgagctgagattgcaccactgcactccagtctgggtgagagtgagactcagtcttaaaaaaatatgcctttttgaagcacgtacattttgtaacaaagaactgaagctcttattatattattagttttgatttaatgttttcagcccatctcctttcatatttctgggagacagaaaacatgtttccctacacctcttgcattccatcctcaacacccaactgtctcgatgcaatgaacacttaataaaaaacagtcgattggtcaattgattgagcaataagcctaaaagcactcattccttttcttttccaaattcttcctttattttcccttcctgaataatttagtcctaaagccattaggtgggtggcagccagatggtggccacacattaaggtagagaagagagagtcatggtggctccaagtcagagaccaaggaggttcatgtggagagacatcctggcctgggtgtgggagtccaagcaagcagagaaggggtcgacgcagaggggtggcttgcaagagcagccagagcctaaatagggtatggagaacccacatgaggcgaggagggcatccatgagtgggaggggttgggtgaggtttggctacataaaggggattgatcaaataagtaaatgtattaaggatgatagaagccaggcttctcacctttgcagaagggagtcatggattcagaaagggagaaaactagcatgaatcctatgaaattagattggaatggatgtaaccgtgtatattcatacccttgtagatagatagatgggtagatagatgatagataggtaacagatagatgacagataatgagatagatagatgtaaatgtatgtctgtatttgtgtgtgtgtacaaaaaacatatattccctacttctctccactgatagggctaggtaacaatgacatttcaatagcaatgaacacacttagtgccccgatcttggcttatgaataccattttccactgaagggaaccagagctctttagagaaatggctgatgccagggcaagaattaagaatgttcaagataagtttaggacacattttgtgccaggaagcaagaaaattttcaaataatttccaagtaatctttggaaatgatacttgaaaatgacttccaaatgacatttccaaatgacttgcaaacgatttccaaatgatatttggaaaaacctaaagactccatcaaagaactattggaactgataaacacattcagtaaagttgcaggatacaaaatcagcatacaaaaatcagtagcatttctatatgccaatagtgaacaatctggcaaaaataaaaaagtaatcccatttacaatagccacaaataaaactaaatacctagaaattaacttaatcaaagaagagaaaggtctctacaatgaatactgtaaaacattgatgaaaggaattgaagacacaaaaaaggatatttcatgtttatatattgtgagaatcaacattgttaaaaatgtccacactactcaaagcaatgtacagattcaatgcaatccctcaaaataccaatgacattcttcaaataaatagaaaaaaatcccataatttgtatggaaccacaaaagacccataatagccaaagctatcttcagcaaaaagaacaaaactggaggaatcatgttacctgacttcaaattatactacagaggtacagtaaccaaaacagcatggttcttgtataaaaacagacacatagaccaatgaaatagaaaagagaacccagaaacaaatgcaaacacctacagtgaactcatttttgacactgctaccaagaacataccctggggaacagaacatctcttcaataaatggtgctgggaaagctggatatcaatatgcagaagaatgaaactagacacctatatctcaccagacacaaaaatcaaatcaaggtggattaaaggctgaaatctggctgagcagggtgactcatgactgtaatctcagtactttgcagaactttgagaggtcaaggtgggcagatcacttgaggtcaggagttcgagaccagcctggccaacatagtgaaaccccatctctaccaaaaaatacacaagttagctgggcatggtggtgcattcctgtagtcccagctagtccagaagctaaggtgggagaatcatttggacctgggaggtggaggctgcagtgggccgagatcattccaatgcacctcatcctgggcaacagagtgagacagactgaagtctaagacctcaagctatgaagctgctacaagaaaacattgtggaaactcttcaggacattggtctgggcaaaaatttctgaagtaataccccacaagcacaggcaaccaaagcaaaaatggacaaatggaatcacatcaagttaaaaagcttccgtgccgcaaaaaaagtaatcaacaaagtgaagacacaaaccacagaatgggagaaaatactttcaaactaacattctgacaacagattaatagccagaatatataaagagctcaaacaactctgtaggaaacaatctaataatccaatcaaaaaatgggcaaaagatttgaatagatatttctctctctcttttttttaattttgagacggagtctctctctgtcgcccaggctggagtgcagtggcactatctcggctcactgtaagctcctcctcctgggttcatgtcattctcctgcctcagcctcccgagtagctgggactacaggtgcccgccaccatgcctggctaatttttttgtatttttagtagagacggggtttcactgtgttagccaggatggtctcgatctcctgacctcgtgatccacccgccttggcctcccaaagtgctaggattacaggcgtgagccaccgcgcccggcctgaatagacatttctcaaaagaagacagacaaatgccacataggcatatgataaggtgctcaacatcattgatcattagagaaatgaaataaaaaactatagtgagatagcatctcaccccagctaaaatggcttttatccaaaagacaggcaataataaatgccagcaagaatgtggagaaaaggaaacccttgtacactgttggtgtaaattagtataaccactatagagaacagtttggaggttcctcaaaaaattaaaagaaagctaccataagatccagaaatcacagtgcttcggtatatacctgaaagaacggatatccgtatactgaagagatatcttcacgctcatgttcacaatagccactactcacaaatgctaagatgtggaagcaacctaagtgtccatcaacagatgaatggataaagaaagtgctccacttatacacaatggagtacaattcagatacgaaaaaagcatgagatcttgttatctgtaataacatggatggaactggaggtcatcatgttaagtgaaataagccaggcacagaaagacagacattgcatgttctcacttatttgcaggatctacaaatcaaaacaattgagctaatgtctgggtcttagtcaattttgtaccctaagtactgtgagcacagcttttaaaatacatgatgaatgctttaatacaggaatgaatagataagaggcacagggtgcctctgggtgttcttctgatacatagtatcttccttgacacattcagtacaactctcagcaggtaagtctcttcatgttatgttaccttctgaggaattaggtggcagaacatgccttctactattttcctttgcagaacaagaccagttgcattagttgggacacagtgctggctacatttgagtcccaagcaacgattagtctattgctgagagtaattagtctatttctacagacttagaggggatgacacacaggggcccagcaatctcacccaagtcaactctgccaacctttctggtcacccaccatgtgtacagtaccttgctagggtccagggtcatgaaagtaagtaataccagactgtgcccttgaggagctcacctctgctaagggaaacgggcacagaaacccacaatggtgctagagaggaaagaggacaataggactttgtgaggggataggaggcacccagaggaagcaatggttacatctgtgtgaggaggttggtaaggtaagactttaacagaaggggtctgtctgtctgggcttggaaggatgtgtaggagtcatcgagggggcacaggtacactccaggcagagggaattgcatgggtaaagatctgtaggtatggcttgtggggatggatttcaagtattctggaataaggacagccatggaaacaaggacaggtgagaggagatttaacagatttcatgccaacatggcacatgtatacatatgtaacaaacctgcacattttgcacatgtaccctaaaacttaaagtataataataataaaattaaaaaaaaatagagttcataccaatggccccacttcagtttctgataagaactcagattccttggactccctgataacactgattaagttgtttatgattcctcatagaacatgaactcaaaggaggtcatcaaaggggtgtgtgtgattctttgctactggctgcagctgcagccccgcctccttctccagcacataaacatttcagcagcttgtcctaagactgctgtgcagggcagggaagctccaggcagacagcccagcaaacagcagcacacagctgaaagtaagactcagagaagacagttgaggaaggaaagtggcaacggacctcatcccaaatttggcggtggaaacctggcttctccttgctgtcagcctggtgctccactatctgtcagtaactgtccagattcctctcctctgttaacttggacttggggtgctctcaggcccctgctcccttatctgttttgaagatcaaaagagatgttcaaggaggagtagattaattgttggatgctacaaacacataaaggttattattgatcttatgcagatttatgaataaataaataagcatttgtcccagctaccttctcattttggtaactaggagggtttagggacagcatttggtagtgggaatgatctgattaggttagatttgacctatactaatcaacaaaaacccagcaaaggcagattacaaactgctgaacacgatggggagtgtgatcctcatccccttcccaggttctcaggattctggggacaggagggagcagcttgggtttttgtctcattaccttcattttctgggttctctgtctgctggaagagatgtgtagaagtttgtcccctgtggacctggtggttcctgctcccccaacttccaccccaggatatcatttacataacgcaccggggaacaccaagacttcacgggaagctgtcccccggctcttccctctttcctgtgccatgtcccaaaacatcccctcccacctatgactcactcctccaccctgtcatacacagaactatttaccttgcaatgattaatctccagagcaaaggagacttggaggaagttttgaagatttattctttgctttaatctttttcctcccgtctctgggaggctagcattaatatagagctttgtttctcacctaatgggaatctgctagcagcctgaaaaggcaggagctgtgaaagccaatttggattttacacattttttcccctttgtgttacagtaaaggaggatgaaccctctcactggtgggattcctggcatcctagagcaggtggagagaagagttacttcccactgtgggtagtggaggctccacctgttccattaacttctacctcaatttgacttttattaagagcagggaaccacaatgacatgaaaatagacactataaaactaattttaattctttcacagaaagcttaggaattcagtgaatagtggcaacatagtttccattttctaacattttaaaataaattgatatggtttaaattcattcatttttaaaccagaattttttggagatagactatttccagcatgttccttctggatgataaaagagggctgttagttcagtatttgtgacaataaatgtgtgtaaaataacatcacctttccagaataatatcaggaatatgagtctaatacatgaatgtatatctctaagacaagactgcatatgtctttttaaatatacatgcctgacagtttattgtaatacctcctttttgaatatacctgcttagcaggctaccttaaactctcaggcaggggagtaagcaatactgtgagctagtgatgatagcaaaggcatccagataggatctgcatgaagtgagaaaatattcctcagctctcagggtagaactccaaagagatattcatgggtcctggccccacagtggaggtcactcaaagggcaaacagattggcatctcatctgcttcaagcctggatacagggacatcaaatgtgtcactctgtgtgtggtctgccatgttgtggggaggccactacagactcgggcagctgggcagacaataccttagccttagacgatgctagtgtagcccaggaatcagaaactatagtgtagaccgtgccctccttaggccaacacaattacatgcaatagatgacgggcttttctgttagcctcttcattggaactgaaagtggcattactctaccaaacagaggagagctggaaagaaactaaacagtttgcccagcacagcctctgccttgacatggaaccatgtgagtctagacactcacctagatctttccctgggggccaatgctgctgacacattaactcattagtttgtcctggcctgagagatcatgtaacatgtagaaggtttagaagcagagattagtgtcattaatttgccatggctgtgacaacaaaggaagaaactggggtgggaaaccccaaggccaccctggttttggtagatggtgcacacacttccactaactattctggggcaaggatccaaatgcactatatgctgcctctgctgggatctccaaacacgaccctccatgccatttctcagttgtattttaccacatattatcagagtcactggatttgtacagaatgtttggaacctatactgccttaagtgctacctgttatagaagagaaaacaaggtcttaattcaactatctggaacattttatggttacttatgtaaaatactgcatcttttgctatcaacaggaaggtacatggacattagaaggcccctgcctttcagctgaaagcacatatgaggcatatggatccatttatatacaccatacttttcagctgcattttcctaatttgcctctctggggccaaccttgtgggactagcagattcacggttgaattgatggctggtgatgtctgccatcagcctttcttcttcctctagtcctccgctcctcagtaacatcagactgggaaggtcttcagacatccagaacccccagttgggggagtccatacatgacccatcaaagatgagttgcaagcaggcctgccataaagagcagcagccttaatgggttttcctacagagatagtcaatgtacagaggcaataaactgactgctttgtgattgatcaccttgaaaaaatgagcatgtctggatatattagtcatttcttgcattgctgtaaagaaatacctgaggctgggtaatttataaagaaaagagatttaattggctcatagttctgcaggctctacaggaagcatagcgacttctgcctctagggaggcctcaggaaatttacaatcatggcagaaggtgaaggaggagcaggcggatcttacatggctgtagtagaagcaagagagggtggggaggaggagccacacacttataaaccaccagatctcataaaaactcattgtcacgaggacaacagcgaaggcaggatggtgtgaaaccatgagaaactgcccctaggatccaatcacctcctatcaggccccacctccagcatttggggttacatttcaacatgagatttgggtaggggcacagattcagaccatatcactggcactgtgcttatcagatgaatatcaccagttggaaggctagattccacaagaggaggaatgtcctggaaattggtttcttaagttgtgattcttctgcacactgtcattcagggcaatatgagtcaatcattctcccccatagctgaaatcaaccagatcatctgaccacagagactgaggtgtagctgaaaggtgctcgcatttctacgaggccagtagaagcctggagcacagttgtcaatctgtagaaataaggactctgactcctccaagacctctctgtgaatgacagtttaagaagggccagatcctaaaacagggtcagagcttagcagaaagggaaagcataaaagcctttgagcaattctaaagacagggccacaataggctctcagtgaccctctgtgactgagtggatgcagcgatgcaaaatctaaccattactgctgaagacaaaaaaaaaaagtcaccctttctacctaggatgagaagccctaaatcagtggggtccacttactaaatagacataaaggaatgaagtgccctggaagaattcctgcctgaacctctcaggagcactcatgtttgaggacacttatcaagtattcactccaggattgggaccatgaaaacttcagctgcttttagctaatcactgtgacttttggggtgtcacagtgcaggcaggaaaggacctgatgaacaaacataatcattgctgtcggagttactgttatttattgccttaatgttacctccttctcctgagcattacatttcctcagtcagtaactcaccatcccctatatctataaagtcacaatccttgagacatgatttctgtttcactttgtagatatgaaacccattcacatggactttttaaaaatcttggcattccaggtcccagacctctgctttttttgggaactactttgtcctaccatcaagtgagtgtttttgagctcactctttggcttcttatgattgcaaacagcagcttagttccatcagtaaaaatgtttctctgcaaaaggaaggtctgaggttttaccctttcagaaacagtgtgtaggcatcacccagagcatggcaatgtttacacaggggctctcttgctaactctcaggaacctcagatttgcctaatttgaacagcccaaatctcaggtagatcagcaacctgatgttcaaaacttgatatgcagactttgtgaacaccataaagaagattttctttttgctccgtgtaggttcccaggaaagtacagtcattgttagtattaaaagtcggaacaggatcccttgattgtggcttgttatctgtgtacatgagagtcaaactttcttctctgtagcaagagctcatgagtagccttttcccccttcctcctggacagctttgaaactcagtttattagggagatcaagtatttaccattgggtcatttgcacctgcttgaatcatctccaacaaatgctaaattccctaagggtttttccatggctctaccttagctcttactccccatgacgtcttttgcagctttgagacacacaaaaaaggggttctgctttacttctttttattcaaaggctgcactttattagtgagtctgaggaaggagtggatgtaactgagatgagatagtggttgtctatcaaacttggatctttttttttatataatactttcagttctagggtacatgtgcacaacgtgcaggtttgttacatatgtatacatgtgccatgttggtgtgctgcacccattaactcatcatttacaaggtatatctcctaatgctatgcctcccaccgcccccaaccccacatcaggccccggtgtgtgatactccctttcctgtgtccaagtgttctcattgttcaattcccacctatgagtgagaacatgaggtgtttggttttttgtccttgtgatagtttgctgagaatgatggtttccagcttcatccatgtccctacaaaggacatgaactcatccttttttatggctgcatagtattccatggtgtatatgtgccatattttcttaatccagtctatcattgacagacatttggcttggttccaagtctttgctattttgaatagtgccacaataaacatacgggtacacgtgtctttatagcagcatgatttataatcctttgggtatatacccagtaatgggatggctgggtcaaatggtatttctagttctagatccctgaggaatcgccacactgacttccacagtggttgaactagtttacagtcccaccaacagtgtaaaagtgttcctatttctccacatcctctccagcacccgttgtttcctgacttttcaatgatcgccgttctaactggtgtgagatggtatctcattgtggttttgatttgcatttctctgatggccagtgatgatgagcattttttcatgtgtctgttggctgcataaatgtcttcttttgagaagtgtctgttcatatcctttgcccactttttgatgagattgcttgtttttttcttataaatttgtttgagttctttgtagattctggatattaaccctttgtcagatgagtagattgcaaaaattttttcccattctgcaggctaccttttcactctaatggtagtttcttttgctgtgcagaagctctttagtttcattagatcccatttgtcaattttggcttttgttgccattgcttttggtgttttagacatgacgtccttgcccatgcctatgtcctgaatggtattgcctaggttttcttctagggtttttatggttttaggtcttacatttaagtctttattccatcttgaattaatttttgtataaggtgtaacgaagggatccagtttcagctttctacatatggctagccagttttcccagcaccatttattaaatagggaatcctttccccattgcttgtttttgtcaggtttgtcaaagatcagatggttgtagatgtgtggtgtttgttctgaggcctctgttctgttccattggtccatatccctgttttggtactagtaccatgctcttttggttactgtagccttgtagtatagtttgaagtcaggtagcgtgattcctccagctttgctctttttgcttaggattgtcttgggaatgtgggctcttttttggttccatatgaaatttaaagtagttttttttccaattctatgaagaaagtcattggtaacttgatggggatggcattgaatctataaattaccttgggaagtatggccattttcacgatattgattcttcctatccatgagcatggaacattcttccatttgtttgtgtcctctttgattttgttgagcagtggtttgtagttctccttgaagaagtccttcacctccctttaatttggattactagatattttattctcttagtaacaattgcaaatgggagttcactcatgatttggctctctttctgttattggtgtataggaatgcttgtgatttttgcgcattaattttgtatcctgagactttgctgaagttgcttatcagcttaaaaggattttgggctgagacgatggggttttctaaatatacaatcatggcatctgcaaacaggaacaatttgacttcctcttttcctaattgaataccctttatttctttttcttgcctgattgccctggccagaacttccaatactatgttgaataagagtcatgagtgagggcatcgttgtcttgtgctggtttcaaagtttttgcccattcagtatgattttggctgtggttttgccataaatagctcttattattttgagatacgttccaccaatacctactttattgagagtttttagcaggaagggctgttgaattttgtcgaaggccttttctacatctattgagacaattatgtggttttttaatcgttgattctgtttatgtgatggattacatttattaatttgcatatgttgaaccagccttgcatcccagggatgaagcccacttgattgtagtggataagctttttgatgtgctgctggattcagtttgccagtattttattgaggattttggcatcaatgttcatcagggatattggtctaaaattctctttttttgttgtgtctctgccaggctttggtatcaggatgatgcaggcctcagaaactgagttagggaggattccctcattttctattgattggaatagtttcagaaagaatggtaccagctactctttgtacctctggtagaattcagctgtgaatccatctggtcctggactttttggttggtaggctattaattattgcctcaattttagggcctgttattggtctattcagacattcaacttcttcccggtttggtcttgggagggtttatgtgtccaggaatttatccatttcttctagattttctagtttatttgtgtagaggtgtttatagtattgtctgatggtagtttgtatttctgtgagatcggtggtgatatcccctttatcattttttattgcatctatttaattcttctctcttttcttctttattattctggctggcggtctgtcaatttttttgatcttttcaaaaaaccagctcctgggtttcactgattatttgaagggttttttgtgtctctatttctttcagttctcctgtgatcttagttatttcttgccttctgctagcttttgaatgtgtttgctcttccttctctagttctttgaattgtgatgttacagtgttgattttagatctttcctgctttctcttgtggtcatttagtgctataaatttccctctacacattggtttacatgtgtctcagagattctggtatgttgtgtctttgttctcattcatttcaagaacatctttacttctgccttcattttgttatttgcccagtagtcattcaggagcaggttgttcagtcttcatgtagttgtgtggttttgagtgagtttcttaatcctgagttctaatttgattgcactgttgtctgagagacagtttgttgtgatttccattcttttacatttactgagcatgctttatgtcccattatgtggtcaattttagaataagtgtgatgtgatgctgagaagaatgtatattctgttgatttggggtgtggagttctgtagatgtctattcagtccactgggtgcagagctgagtggacatgaacattttatcaaagaagaaacacagctatcaaaaatccagaaatattgaaccttgttaataataaagtggctggcctctggttcattcctgtaatctcagtcctttgaaaggctgagaaaggaggatcacttgaggccacaagttcaagaccatcctagacaagtcagttcaagaccagacttcatgtctacaaaacatcaaaaaattagccaggcatggtgatgcatgcctgtcatcccagctactcaggaggctgaggcaggaggattgcttgagcctgggagattgaagtggcagtgagccatgattgtgccattgcactccagcctgggcaatgcatcaagactctgtctaaacaataataataataatagtaatagtaataataataataataaagaaaacggttgggacgccattccttacttattcaatacacaaagttaaaagcaatttctactttctctatttttttattactaaaaaaagctgaaccattctcacagcctgaaatgcttctcaccttcccctcttctatacaaacacttctctgttgatgataatgcagacagtctctcctttaggaatacttcacaccaggtagttccagatccccttatctctgccttcccagagctcctggtgtctccccagttccctctgtgtggtgaagtacccccaccttgggtctcagcatgactcgttctttgaaggtcttgttcacattttcccttatggttctgttcccctgtgttgtgtcacagcactgggcagagtggacaacccattcacaccgatagagagggccccatggttctggagataaccatgtaactgatcagaatagggcattgagggctgggtgtcaggcatgggctgcacttgggtgggcaggccccctggaaagtcacaggatttggcaagcttcctagtaacatctctccctggggtcctcttggaacttcatgcccgatgctggatgctggtttattctcgagagatggttcattccaataatcaatgaaactcatgtcccaactaaagttcataaactccagtttgtaaactgagataatctcagctgaatgaacttgctgaccctctgctttcccccagcctctcagtgcccttgaaatcatgtcagttcaagcagccccatgaggcattacaatgtttagttatttcagtgtttattaaaccttgccctatgctgaccccaggtgaatcacaagctggacttctgacaaggacaagctatgatattcttttcaattacagaaaaagtaagttaactgataggattttttaaagatgttactagttttggaaaggtaatttgtgcacatggtaaacaagaaggtataagaggataatgcttttatactgctgagaataatgttttctctaattttttttggtagatgctttcatcagattaataaaattcactgctgttagttgttgaaggttttttatatcatgaatgggagttgaatattatcatgtattattaatatattattattgaactagcaaaggctcttcctaaaacaattgagatgatcttataatcgttctcctttaatctgttgatgagatcattggtatttatactttttctctgttaactattcttgagtctcaggtttaaattcaacttggtcatggtgtatcatctttgaacactcctgtctctggcttgctactattgtgttcagcatttttgcactgatgccgatgaatgagactggcatgtcatcttcctttgcggtcctgatttttttcagatttggatcatgtggccctcattgaatgagttgggtgtgatgccttctttttcatgtatctggattgatgggacactttggagtctctccagatggccctcaatggtccctgcctcctcattgttaggctcctaggcaaccctttctcatttctggtaggcccaggaacctgtgggttttatgtttgtttgtttgtttgtttgtttgttttttgagttggagtcctgctttgtctcccaggctggggttggagtgcaatggcctgatctcggcccactgcaacctccacctcctgggttcaagtgattctcctgcctcagccttctgtgtagctgggattacaggcatccaccaccactcctggctaatttttgtatttttagtagagacggggttttacaatataggccattgtgatctcttggacaggctagtctcaaattcctgacctcatgatctgcctgcctcagcctcccaaagtgctgagattacagttttgtgcctccacacacagtgaatctgtggtttttaaaagctcctcatgcatgtgaattctgtgagcatcccgggatgacagccactgtgtgtccagctgttaaaactgtgagaaagcaccagcgggaccctctccagcatttgcttgctgtggtcatgaaagaggcttgttggggagatgatgccctggttgactcctgaaggatggttaggaatgcaccagatggaagctgggttggacccagtctatgctaaagaacagcttgtgtggacacaaggagacacgaacacatcatttttgcagagcctggggagtagccaatcgcaccatttgcttaaaacaccgtgtacagttggagaagtggactgagacaggctgaagaagctaacagtggccagatgagaaagggtcttgtgttacttcctagatatacttagattttatcctgtgagtgataggaacagttgcagggactgaagccaaggaagcatgctttaagattccatgttttttgagatgctgtctggtggctgagtagggaattccctggataagtactgcccagggtaggcaaaagaagctaggaggttactgaaataaggagtatgagaaatggtgtaggttttgctgatgttttgtaacacatctcatgacaatcttcatttccttcaccaatttcctgtttcattaattcccttccacgtgctcttctgaaatttgcctcatattctttgatttctcttttacatgttggtttcatcaccttttactttttgctttcctggaaacacaaatgattctgattgtgacatgtcagaattatttgcaacattcccctttctgctgaaacatgagctcactgaatacacaatttagtaaagtgtaggatgcacatgttgttttcatggtcataaccagctctgtagcattttataactacactggcagtgtgctgggaggtgtagagagaaatatttatctcatgtgtggctgacacaacctgccaagttgttttaggagccttcttggaatcccagcaagaacaccactgatgcaatttgaaatcacaatgtcctgctccatgccctggcttcatggcttagtcacgtctgaagtctatttctaactatctgtttccacatctataaagtatgagttaaatcatcctaatactactcatcttacaaagttttcttgctgatattaggagagttgggaaagaactgtataaattatgaagtgccatggagatgttggtggttactttatcaagaaatagacactccagaatagagtagaaagaaaacagttatgattaagtcctcctcctcttctttttttttaatttacaaagaaaggtttaattgagtcacagttccatatggttggggaggctcagaaaacttgcaatcatggcagttggcaaagtggaagaaggcaccttcttcacaaggtggcaggagagagagagctcctcttcttttttgttgtaaagtctacagaagtgcatatacttcagggcaagggcaggcagggagaagaaaggacattgcttcaccccagtcctcactgacaagtttgctttgggacttcattttgtcccagcatatgggacagagctctggccactacccattcagaaggcctgagctgcattgctagttccccactaactctgtgtgtccttgggcaaggctgggcttatgtcaaaagattatgaccctgggctctccagctacagaatctacatatgaatcctggctctgctagagcaattagtgacgtaaccttggatgggtcagttaaccttcctgtggcttagtttgctcatctgtaaaatagggatcataacaacatcaataccatgggttgttagacagattgaatcagttaatgcagggtaaatacttagcatgacacgtattcactatcatttccttgagtaaaagctgagtgtgagtgggtgtgagaatgtgtgaaaccctttcactgcaatctcagttaagaaacccatccataatttaaagttcagggcctaaatgggtggttatcttctcccagttgcatcctatcccacctttgctcttctcctgcccgtaggagctgttggtctttgattgggctggaagacctggtggaccctaagtgatctataagagaatgagaatagaggacagggaatgtcttcaaaactcctagagggacacagaggctgagaggcaggcagtcctgcaggggtcttctgattgggacaaggaggaccttggtcttcataggccaattctggtcaatttcccccatggacagatgaggaaacagatccaggaatatccaaggtctcacacttcccatctgtcaagtcttgttgattctgttgtattcatgtctttcaaagagagagagagtttaaggaaagaaagaaggatcaactgtgtctgatatcactgggagcttaagtaaagggttcttttacttcatagcatttttcccaatttgtaattcagtattatttttgtcactgtttagtatctctttgtcctattagagagatagcttcatcaggacaaggattttgattctttaatatttagtgcttgccacatgccctgaacacagcaggcatacagactaaccaacatacagtggcatcgaagtgagacacctacctcctccagtgcctagagtacatgtccatggacctgtcactctcctcaacaccacccctaagcatgaggcccgaaagcattgctaatcccctcctccagccaccaaaacttaaaggccaggtgtggtggctcctatctgaaatctcagaactttaggagacagcagcaggaggatcacttgaggccaggaatttgagacgagcctgggcaacatagctagacaccatctgtactaaaaattagctgggcatggtggtatacctgtagtaccagctactaaggaggctgaggtaggaggatcacttgaacccaggaggtggaagctacagtgagctataaccacagcactgaactccagcctgagcaacagagtgagaccctgcctcaaaacaatttcaaaaataaataaataaaaacaaaacttagataccacgtggtcaccccaacatgcaaaatcaagttttcccctactgagaagaatggggacttgagagctgagttacagagagataatctgcctttttttttttttttttggtttacatcctcaagatcatgacctgtgaaatttgaatctaatacacaaatcattccagagcaatgttgcttctgcctaccacgagtaattcacttggccactggaagtcagaacaagcttcccagaagagaggtaccacttggactaccaatataaaaggatgaaaatatcggagtgaaggtgttccttgcatcactgagtccctggacagcctgtccactcatgctgatatctgagcctaatgcttctctgaatgttgagatttaactttgatccaatgaaaccagaccaagaaagaagaaacgtctttcattgttgataaggacatgatttttctcacaattttatgattatttttccttagctgtcctataattatctgcttatttgtctcttctccatgtgcttagggtacaaagttgaccaagaccaagaataatgtctgggagcacaatactgacagcacagctttaaaaacatgatgaatgctttaatacaggaaatgagtaggggagaggcaagtggtgcttgggtgttcttccaatgcatagtatcttccttgacacagtcagtgcagctctcagtaggcaagtccctacatgttagaagatgttactttctgtggaattaagtggcagaacatgccttcaattattttcctttgcagaacaacaccaatttcattagttaggacagagtgctggctgcatttgaattccaagcaacgattagtctatcactgttggtatagattccaaccagtcacaccacctcctgaagtttgtagggcaggtaaatcttcatcttagaataaaaatcatcttagccaagtaagtgttttagaggaaagaagaaaacataatcgtttccataagagttttgtttctaaaaaaataagaaaggctctttgtttaggtgagctaatgaagttgttgatagttatcagatgacactggaatctttacttgtcagaatgtgttctgtgcacctctcggtgtggcaacatagagagggagatcctccagcaatgccattgatatggtcagaaactgcatctttctttctccctgctgagatggagtcctttgttctagaaaacccagggggtgccactgggagtaacccttgagacaggaacacgaatctcaaccaatttctggttgcagccttgagtcttactatttgccatagtgatgcttagcaaggaatggcaggtgcaccagagcagcagaggacctaatatctcccttcctgttaactttttataatattttattgtgatcagtatcagttgggaagctacttgcagtcactgagcctcagtttctacatctgtaaactggggatagtagcatggccctatttaatgtgctcagcgaagccactgaaaggagacagaaatgtaccagaattccctggacttttatcctacttctcctggggattgtcacccacctacccgtgtctgtcctttgttgctttgacgctgtcacttcttttcttaggtacctctctgtagggctccattattccagggattccagagttacagcacatgcatacctccatccaagcatgtttatttgtctcctgcttcactaggctgtccccaaggaacatgtggctcccggcacatacctggcacaacactgcacatgacattcacccacttggccttgaatctgacaaggaatctggcatgatgttcacctgctgaggccaggtgccgagcagccctggaggcttaggggccagagggatgggaaaaggtgtctttctggggtgagtatcagtttctgcaggagtgctgaacctgagaaagaataaagagagaaggaagtgaacaagcacagcttaaacatcatctgtttctactgagttttaacaactctgagattttgtttgtcatggaatccatttctcaggccaagcagacacagaacttgggtgtgagtgatgataatgagctgatataattttcacaccctcatcactgagatctctcccatcaggaatgggtcacagggctcacaggtggcagcaactgttattacaggcctcatctctaccagctcctggcacctgctctcctcccattagaaaatcctccacttgtcaaaaaggaagccatttgctttgaattccaattccaccctcaagaggctgggaccacctcattggagtccttgatgctgtgtgacctgcagtgaccactgccccattgttgctggctgaggtggtttgggtcaacctggccatctgggcagctgttctcttctcttctttctcccctactgtttccagacatgcagtatttccagagagaaggggccactctttggcaaagaacctgtctaactttctatctacggcaggacttttgaaagctacagaggaagaagcacaaattgatgctattccactaagccatcagctccatctcatccatgccatgtctcttttttaggggtcctcttgccaacagaatcacagaggacaaatctgaaagtgcagagacagcagctgaggcacagccaagagctctggctgtattaatgacctaagaagatggagtggtcaccagaaagtcagaggaagtgacacacaggggcccagcaatctcagccaagtcaactccaccagcctttctggtccccactgtgtgtacagcaccctgatagggaccagagccatgagagtgagtaagaccagactatgcccttgaggagctcacctctgctaagggaaacaggcctggaaacacacaatggtggtaaagaggaaagaagacaatagaactgcatgaaggggatggaaagtgcccaggggaggaaatggttacttctgtgtgagggggttggtgaggaaagactctaagagaaggctctgtctggctgggtatgaaaggatgtgtaggagtcttctagggggcacaggcacactccaggcataggtaaagatctgtaggcatggcttgttgggatgagtttcaagtattctggaatgaggacagccatagagacaagaggagagttaatagattttatgccaatggctccacttgagtttgtgataagaacccagaacccttggactccccagtaacattgattgagttgtgtatgattctacatagaatattaactcaatggaggtcagtgagtggtgtgtgtgtgattatttgccaactgccgaggtggagaagcctcttccgactgcaggcagagcacgggggccctgctactggctgcagctccagccctgcctccttctccagcatataaacaatccaacagcctcactgaatcactgctgtgcagggcaggaaagctccacacacacagcccagcaaacagcagcacgctgctgaaaaaaagactcagaggagagagataaggaaggaaagtagtgatggatctcatcccaaacttggccgtggaaacctggcttctcctggctgtcagcctgatactcctctatctgtgagtaactgttcaggctcctcttctctgtttccttggacttggggtgctaatcaggcctctctttcccttatctgttttgaatagcaaaaaggatgttcaggctggccgtggtggctcacacctgtcatcccagaactttgggatgctgagcaggtggactgcctgaggtcaggagttcaagaccagcctggctaatatggtgaaaccccatctctactaaaattacaaaaattagctgggcatggtagtgcataactgtagtcccagctacttgggtggctgaggcaggagaattgcttgaacctgggaggcggaggttgcagtgaactgagatcatgccactgcactccagcctgggtaacagagtgagattccatctcaaaaaaaaaaaaagagaaaaaaaagaaaaaaaaagattttcaaggagaagtagcttaagtgttggatgctacaaacatatagaggttatgatggatgttttgcagatctataaaggaataaataagcatctcccccattcatctttagtggaaagaagggtttagggacagcattgattaaggataatctaatagacaatggtttgtacccagcttaccaaaccagaatttggattttacatttttccctttaagttgcaggagaagagggtgaatcttctcaccagtgagatcctggcatcctagagcaggtggagagaagagtcactccctactgtgtgtactggaggcttcccgcctgtcacattttacttctaactcaatttcacagttattaagagtaaggaatcatggtcacatggaaacagaaaatacaaacctcgttttaattctttcacagaaaagttagcaattcagtgagttgtggtaacatagtttccatctactggcaatttaacatgaattggtgtggcttaaattcatcctttttaaagccagatttttttggagatagactatttccagcatgttccttctgagtgataaaagagggctattagttcagtatttgtgacaataaatgtgtataagataacctcacctttccagaataatgtcaggaatatgagtctaatgtacaaatatatatctctaggacaagactgcatatgtctttttaaaaatactttcccaagagtttattttaatacccccatttcaaatacacctgcttagcaggttatcctaaactctcagggctagaaagtaagcaagactgtgagccagtgatgatagcaaaagcatccaggtaggatcaagatgaagtgagaaaatattccttacccctcagggtagaactccaaatagatattcatgggtcctggccccctagtggaggtcacttgaaggacaaacatgttggcatctcatctgcttgaagcctggacacaagggcaccatcagtgtcactctgtgtgtggctggccatgttgtggggctgtcactacagattctggcagtcaggcagacaataccttagccttagacgatgccggtacagcccaggattcagaagctatagtgtagaccatgcccttcttaggcctatacaattacatgcaatagatgatggatttttctgttagcctcttcattgtaaccaaaagcagcattactctaccaaacagaggggagctggaaagaaactaaacagtttgccaagcacagcctctgccttgacgtggaatcatgtgaatctagacactcacctagatctttcctcgggggccaatgctgctcacacattaactcaatagtttgtcctggcctgagagatcatgtaacatgtagaaagtttagaagcagagattagtgccattgattttccatggctgtgacaacaaaggaaggaacaggagtgggaaaacccaaggccaccctggttgtggtagatggtgcacacacttccactaactattctggggcaaggatccaaatgcactattgggcctggctatgctgtctctgctgggttctccaaacacgagcctccatgctgtttcttagttgtattttaccacatattatcagagtcactggatttgtacagaatgtttggaacctatactgccttaatggctaccctttaaagaagagaaaacaaggtcttaattcaactatctggaacattttatggttacttatgtggaatactccatcttttgctatcaacaggaaggtacctggccattagaaggtgcctgcctttcagctgaaagcacatatgaggcatatggatccatttatacacaccgtacttttgaaccacattttcctaatttgcctgtctggggccaagcttgtgggactagcagattcatggttgaattgatggctggctacctcttccatcaacttttctgcttcatccagtcttccacccctcagtaacctcaaactgggaaggtcttcagatatccagaatccccagttggggaagtccatacatggcccatcaaagatgggttgcaagcaggcctgctatagggagcagcagccttgatgggttttcctacagagacagttgatgtgcagacgcaataaactgactgctttgtaattgatcaccttgaaaaaaaatgagcatgtctggctgtattagtcttttcttccattgctataaaaaaaaatctcagggtgggtaatttagaaaggaaagagatttaattggctcatggttctgcaggctctacaggaagcatagcgacttctgccgctagggtgccctcaggaaatttacaatcatggcagaaggtgaaaaagaagcaggcagatcttacatgactggagcagaagcaagagagggtggggaggaggtgccacacacttataaaccaccagatctcataaaaactcattgtcaagaggacagcacccaagggggatggtgtgaaaccatgagaaactgcctctaagatacaaccaccatctatcaggccccacttccagaattggggattacatttcaacatgagatttgggtaggggcacagattcagatcatatcactggcactgtgcttatcaggtggatatcaccagttggaaggctagattccacaagaggaggaatgtccttgttcttagttgtgattcttctgcacagtgtcattcaggaaaatatgagtcaatcatcctccccaatagctcaaatcaatcagatcctctgaccacagagactgaggtgtagctaaaaggtgctcgcacttctacgaggccaatggaagcctggagcacagttgtcaatctgtagaaataaggactctgtgactcctccaagacctctctgtgaatgacagtttaagaagggccagatcctaaaacagggtcagagcttagagtgaagggaaagcttaaaagcctctgagcaaattctaaagacagggtcaccataggctctcagtgaccccctgtgactgagtggatgcagtgatgcaaaatctcatcatcactgcagaagacaaaagaaaaattgtcactctttctacctaggatgagaatcccaaaatcagggaagagtccacttactaaaaagacatgagggaatgaagtgcctggaagaattcgttcctgaacctctcaggatcattcacatttgagaacatttatcaaatattcatcccagactggggccatgaagacttcagctgcttttagctaatcattgtaactttttggtgtctcatggtggaagcatgaaaggacctgatgaacaaatataatcattgccgtcagagttactgttattttttattgccttaatgttacctcctttgcctgatcattccagttcctcagtcagtgactcaccagcccctatatctataaagtcacaatccctgagacctgatttttgtttcactttgtagatatggaacccgtacacatggactttttaagaagcttggaattccagggcccacacctctgccttttttgggaaatgctttgtccttccgtaaggtgagtgtttttgagcttcctcttttgcttcttatgattgcaaagagcaacttagttccatcagtaaaaatgcttctcctcaagaggaaggtctgagattttatactttcagaaatagcgtgtaggcatcacccagagcgtggcaaagtttaccctggggctctcttgctaactctcaggaacctcaagtttgcctcagttggacagcccaaatgtcaagtagatccagcaatctgatgttcacaacttgatgtgcagactttgtgagcaccataaagagcatttcctttttgctccaggcaggttcccaggaaggtacagccatacttagttagtattaaaagtaggaacaggagcccctgattgtggcttgttatctgtggacatgagagtaaaactttcctctctgtagcaagagctcatgaataggcttttttcccttcctcctgcacagcttggaaactcagtttattagggagatcaagtatttaccattgggtcatttgcacctgcttgaagcctcttcaaaaaatgccaaattttgttggggaatttccatggctttaacccaggtcttactccccatgacatctgttgccactttgagacacagaacaaaagtgttctgctttacttcttttcctttgaaggctgcgtcttgtgggtgagtctgagcagggagtggatgtaactgagatgagatagtggttgtctattaacctcagatatttaagcacaatatgaattcatgggtttattttttacacaaaggcagaatcacatgcaaaatcactagaaaggggatgatttgacaaaattattgaatatttaatttcactaaatagaatgtcatatgtgcctcatggactggggactttggtcgagcctttgtgcctaaccttatctgatgctgtgttcagggcctggtccctggatggaaaattatgagcttatttccacagggccagcagcagcaggagtcagctctctggcttagacaatctgacctgcatacctgaggcttgtttctcagattctagttctcctaagtgagggctttgttgtctaattactgcccaggaatttcatattttttccctctgcaaaagcaataatttccctactttcacatgcgtccgtgtgaggagaccaccaaacaggctttgtgtgagcaataaatgtttttaatcacttgggtgcaggccaactgagtctgaaaaaggagtcagcaaggggagataggggtggggcagttttataggagtggggtaagcagtggaaagttacagttaaaggtggttatccattgtcagcagtggagggggccacaaggtgcatggtggggagatcataagactcattgtgcagagaagaatgtcaccaggttgattgatcaatcagttgggacagggcaggaacaagtcataatggaatgtcgtaagattgctcaatcagttaagacaggagctggctgtttcatttcttttgcagttttcagttgcctcaggccatctggatgtacatgtgcaggcttgggctcagaggcctgacattcctgtctttttatattaagaaaaataaaacaaaatagtggcaaagtgttggggcagcaaaaatttttggggggtggtatggagagataatggatgatgtttctcagggctgcttcaagcgggattatgggccatgtggacaccttaaagaaaattttataatgagttacaaggaataggaatttaggctgtggggagatcttggggcagaggatggtaccatggacttgttaaaagtaatatttgttgtatagaataattggtgatagtctgaatgtgtttttatattaattgagaaaccaattgaagacacaagtcccgaataacagaaggagaaaaacaggtaccagaggactaagaatagggaggagctaagacacccagttagaaagtgtccaggtgggtccaaaataagtatttgcctggctggtgagtttttggtctttatctttaagcttttttatattgtcatataccaggccagattggtttagataaaaacaacattcttcatttaaaaatatagagtactcctttttcagcagtgagtaggtcaaggcctcagcgatgttggaggacgactagggctaagaagtcaacctgggtctgaaggactgataaagtttgtgatgtatctgtaatgctagcagaaaagtcattagaaaggctacagaaagttgtgacagaagttgaaatacctgctattccagctccaagggcaatagtggaagcagaaagtcctaaccctacaagtagagggattagaggaataactcatttttgtctggttggtgtcatgagggggacaggaagttgttccgtcccatttgcaaattgaattttttcaatttgggaataagaaatactagtgtacatgtacctgtccaattagcagatagacatatgtacgtggtggagccacagaggaagcagaggccttgtgtgaggcaaaactggaaatgcaaagtgaaaagatgagagggagtgccaaaagaggtgtcttgcacccagactcttagggatttagtgagggcatcagcccttagtggtcataatggggattgatggggcaactgggtatgagaaagagcatagtgtctacaaccaaactttcattgctattcatggggttcggtataagtaaacaagaagggggaatgggaggagagtctgaagaacaaggggaaggtagccaagaatggagtgaaatacagggcaaatgtcttaagggaaatgagaagttctaagagggggctagttgcttgtaacctacatggaagaggtcatgaaatgacaacagaatagaatgggcctgtgagactggaaggagatatttttcttggtctaagaaccatcttccttgagtggggagggattgatagatggaaacttcagtgggagagtaaataggagtgactgatgagaaggagaaaaactggccatgagggacagaagtaggaatactggttgcttctttagctgtcttatcagcataattgttgccttgagcaatggggtctgaggccctttgatggcctttgcagtgaatgactccagctttttttggaagtaaagtggccttgagaagaatttttattaaagaggcattaatgatggaggacacttgcatagtgaagaaacttctttcagcccatattacagcatggtggtgcaggatatggacagcatttagagtcagtataaatattgatgtgtagtccctttgcaagagtgaggccccaagttaaggcaatgagtttggcttgctgagagatagtggaggggggcagagcagtagcctcaatgatagatgtggaagataatatagcacagcctgcctttgctggtgagtggtgattaggcctggtggaactgccatcaataaactaactgtgattcaggtgaaaaacaggaaagaaggaaatatggggaaatagagtgaatgtcagatggatcagagagatacagtcatggggataaggtgtggtatcaggaataatgtgggaggccagattgaagcccaggccaggtacaatggtaattgtgggagactcaacagagagtgggtattgctaaaggagctggggaacagaaagtatatgcatcaggtgtgaggaaggaaatatattttggaagttatgagaactgtatggagtgagttgagcatagtttgtgattttgagggcttctaaaagtattagggtggtggcagccactgcacagagacatgatgaccagcctaaaacagtaaggtcaagttgtttggacaaaaaggctacagagcacggtcccagtccttgtgtaagaattccagctgcacagccctgcacttcggctgtgtgtaatgaaaagagttgggatgagtcaggaagagctagtatgggagcagcctctagagctgtcttcaaggaatggaaagaggagtgaggaaaggatttaggacttatggggtcagctaggtttccctttgtgagtttatataatggttttgttaggatggcaaaaccaggtatccaaaggcaaaagtatccaaccatgcccaggaaggaaaggagttgttttgtagaaggggttggggtttcagagatcagccagacatgatcagcagggagagcccatgtgttttcatgaagaattatgctgaggtacgtaacggatggagaagaaatttgagctttggagggggatacccgatatcctttggagagtaaatgttgaaggagcaggagggtatcttgttgaaaagactcaaaggagggactacagagtagaaggtcatcaatatattgaataatgtgggaagcagagggatgggaagaaagtaaatcatgagagagagcttggctgaagtaatgagggctgtcccagaagccttgtggcagtacagcccaggtaagctgctgggactgatgggtgtcagggtcagtttaggtaaaagcaaagagaggctgggatgtgtggtgcaggggaatagtgaaaaaagcatctttaagatcaagaatggaatagtgagttgtggagggagatattgagaacaaaagagtgtacgggttgggcaccacagggtggataggaaaacaattttgttgataaggcgcagatcctgaacaaacctgtaagacttgtctggtttttagacaggtaagatgggggaattataaggagagtttgtaggctttagaagcccatgctgtagcaggtgagtgataacaggcttcaatctccttaaagcctcttgtgggatgggatactggcgttaagctgggtaagggtgattaggctttaatgggatagtaatgggcatgtgatcagttgccagggagggagtagaggtgtcccatacctgtgggttaaggtggggggatacaagaggaagacacgaaggaggctttgggttgggaagaaggatggcaatgagatgtagctgtagtccaggaatagtcagagaagcagataatttggttaaaatatctcagcctaataagggaactggcaggtggggataactaaaaaggagtgcataaaagaatgttgcccaatttggcaccaaagttggggagttttaagaggtttagaaacctggccgtcaatacccacaacagttatgggggcaagggaagcaggcccttgaaaagaaggtagtgtggagtgggtatcccccctatcgattacacaggggatggacttaccctctgctgtaagagttacctgaagtttggcatccgtgattctccagggggcttccgaggtgatcgggtagcatcagtcttcagccactaagccaaggagatctgggaaggagtcagccaagaaacattgggtttgagctccaggaactttaggagcagtggcgatgtgagtcagacagtccaacctctaattggagcccacacagacagggcacggcttaggaggaatcccaggctgtgggccttctgaggcccagtggccaggcttttggcatttgaagcaaggtccatgaggaggttttgaaggagcccctgggagctgtggcttggatgttctgaaggttttgtatgctggagacatggtcgtgggttgtcttacactggaggcaagtagctataattcagagatgcattgtcacttggccgcctcttctctattatgatacaccttgaaggtgaggctatttaagtcctgttgtggggtttgaggcctggaatccaatttttggagattttttctaatgtcaggagaggattgggtcataaaatgcatattaaggataaggcggccttctggcccctctgggtccagggctgtgaagcatctaatggtaggtgctaagtgggccatgaactgggctgggttttcatctttaccttgggtagtttcctttagcttgtcataattaacagccttgtatgctgcttttttgaaccccttgactaggcaggagaccatgtaatctcacctagctatacctggggagtccatcttgtactgccaatggggatgctcttggggaactgccctgatgccttcttgaaggtctggctcatggcactggtgggtgtcagtgtgagattgggctagggtatcaactctttcctgctcatctggggagaggggggaggtcaggatgacatttcagtcactccaggttaaatcgcaggactgagttaaatattggaattcctgtatatatttagtggggtctgatgaaaaagagcctaaacgctgactgatctgggagaggtcgatagagaaaaaggcacatgtaccttgactatgccttcagctccagccacctgactaagaggaaattgttgggcaggtggaggtgggctagtctcggaatgaaactgtaaggtggagtgggtgtgaggaggggaggtgatacttctattatagggtgggggagcagaggatgaggaagaattgggacctggcttggcctggtgaggagcagcctggtggggaggggagaggtcagatgggttcatagaaaaggaggattcaaaggactcagagcttagggtggagactgaagaaagagacaggagagaaagaagaaagatttgggatgagtcacactgggagcagagactagggagagactgatgtataaaagaatgcctggatgtcaggcacctcagaccatttgcccatttttcaacaaaaatcatccaggtcttataagatcgagaaatcaaaagtgtcattttctggctatttggaaccattgtccagtttgtattgaggccaagcggtattgcagaagaaaataaggcatttaggttttaggtcaggtgttagtcaaagggggttttaggttttgaagaacacaggctaagggagaagaagagggagtggaggctggaaggttgcccatagtgaagggggcaagcccagagaaaagagaaggtagagacatggagagaggggggatggtacttgccacccagggaaggtggtgcttgccacccagggaaggtggtacttgccacccagggaaggtgatacttgtgacccaggggaggtggtacttgcgccaaggtgaatgatcaaggcaggcatccccacagtgatcagatacctctgaaatgtgggtgaataaccaggcaggtgtcctggcagtgatttagacaccaagggaagactgttcccgagtccatgactggcgccagagttttgagttcatggataaaacgtatctcctctgtctctaccagaaagggaaagaaactgaaattaaggaagggagagattgaagggtggagggatagcaagagaggttggagaagagaataaaaagaggccgcttacccgatttaaaattggtgagatgaccttgggctggctggtctgaggacccaagaggtggatctccccatggagtgagggcgaggacaggggatgggactcccgaaggagtccccctgtcccaggtctttggcaccaaatgtcatttgcgtccatgtgaagagaccaccaaacagtctttgtgtgagcaataaagctttttaatcacctgggtgcaggctgactgagtccgaaaaggagtctgcaaagggagataggggtgggtcagttttataggactggggtaagcagtggaaagttgcagttaaaggaagttatctattgtcagcagaggagggggtcacaaggtgcatggtagggagatcataagactcattgtccagaagaagaatgtcacgaggtcgatcaatcgatcagttggggcagggcagtaacaagtcataatggaacgttgtaaggttggtcaatcagttaagacaggagctggctgtttcacctatttgtagtttttggttgcctcaggccatctggatgtacccatgcaggcttgggctaagaggcctgaaacccaccactttcccatgtcaaatctttagtagatgtacccccaagatacacattcctcggaccttcttttccatagttaaaacttcacccctgaaatgtagaaacaggaaggttttttttttaagtttcagtgcaaactcggagcaagtgtcataattttctgtctccgatgtgtagaggtgacattttctcagaactttcacgttaagctggaaaactggaaagcgagtccactttgtcattctgtcactcactcattttctcactcaacaaacatgcctcacacttatctaaatctgctagactaaaagaggtccctggtgtctgtaactttctaattctgctagaattctagagtgagctcatgaaataaatgaaaaggatgaagaacaaagagaaaaaagactgcacgttcccttctggcgctcactcacattccctcagcctcagtttctccacatgcccctagaggtgatcattcaaggatttatgagattttagagacaacacatgaaaaagcaaagagacatcagaaagacaaggagttacttagtatttatacacaaggataagacattcagtatcgacaacacttaaagaaaattcaagagtgattttaaatttcccatttcaaatacctcctctattttgtttcctttctcttatgacatctctaaataagcttcctctaactgccagcaagtctaatttcattggatttgactgttttcaaccccaattagaggcagggttaagtacacttaaaataataatgaaatattattttgtttctcctcccagggctattggacgtttgacatggaatgttataaaaagtatagaaaagtctgggggtgagtattctggaagattccattggatagacttgtttctatgatgagtttaccccactgcacagaggatagtctcagcccagagcctcttgcgatgaagctcttgccagcctaactacaaacagagaggttttctgaaagaagaagatatgtatttgggagaagagtattagaatgggaaactgtgtgccattataagctatgtgcaaattcagggaggtaaaggaagacaaagatgttccacagaaaatatgaggaggacttcatgtggattttgaaatagttctccttcactacaaagatcagtaacaagggtgatgccacaccaaggttggacaggcagttgctgggcaggtgtccttgcagaaatatttttgtgtaaggttgggttgggctttctgcaagctggtggttttgccaagtattttgtgatagttttgttatcaggcacacaagcatgagaatccactcatcatagccttctttgatttatttgtcaaggtttttaatcacacacataggcacacagacacactgacacacacacacacacgtgtcataattttggttctcacaatgttcacactcgctattgtaaaacaactttttgagatttgtcctaccaaggatcccatatgtcaccaggtgttgaggtcttcggtctaaactaggctgagaccattgtggttaccacttttctccaagctttggtggcccagggactcccagcatcacgttctgtccagtgtctgcctattcccttcttctttttttcttcccttgatgcccttttatcacatgcattgtctcagacccttcgaatatgtgctcataaatgcatggcatcatctccttcccacatcgattcactttcaattaaaagccaaaactctttcatttcaactttggatttaacatgcttttgaaagaagggttgagaaatatagagaaacagattgggaaaccatgctctgctgtttcttttttttaaactttctatgtaagtgtggaatttttcattctgttttattattaactttaagccaagactttttaatagaaggatatataaatacatctttgtctatacatttctgctgaatttgaagaaatgctgaatattcttaaaccattgtgttccctggtgggctgatggactgtgattttataaggtggcctcagccaactgcagcagctgttccctgtcagaggggctagaggtttggcaagagcggtggaagaggtgcagtggtgtgttcgttcactagaagcatcagggagaaggttttgcctgtttgtatttcatcttctctcatcaagtcctcagaaaccacagtgctgtctgcagggtgctgtggatctggcatggcccatacaggcaacatgactgagtagaaaggacacacagctctggatgtccttgggccccacagcaactgcccttgaaacatttagtccttgtgagcatttgatgatttacttgccttcaattttccatggacctaatactctttataaagggaaatattttaaacctatgaaacattgtggagaatggcatgggaaatacccatgtatgcaccacccagcttaacaaatgctctcctgtcatttctaaccacaatctctttgaagagctcttttgtctttcaatctctcttccctgtttggcccacattacccttcatcgtatgaagacttggatggctcctgtgtcagactcttgctgtgagttatacctaatgaactagaacttaagattactgtgtattgtacatctagaggattatgtaatgtccggatcaaagtctggcttcctgggtttggctccagctgtagcataaggctgttgatgtttaatcaactctgttttctccacacagtatttatgactgtcaacagcctatgctggctatcacagatcccgacatgatcaaaacagtgctagtgaaagaatgttattctgtcttcacaaaccggagggtaagcatccattttttgaaattaaaatactcattgattgattaaatttttattttaaaattcttatatattcatagacagttgcctaaaaactgtgcaggaaggttccatgtacacttcatcctgcccatcccccatggtaacatcttgcaatcttgcataactataaatacagtatattcacattactgcagtacaggaaattaacattgatacagttcacagagtttattcagatttcaccagttttatgtgccctcatttgtgtgggtagttttttgtttttgtttttgtttgttgtttgttgtttgtttttcggactgagtcacactctgtcacccaaatgggagtacagtggtgtggtcttggctcactgcaacctccacctccagggttcaagtgattcttctgcctccacctcccgagtagctgggactacaagttgcaccaccacgccctactaatttttgtatttttagtagagacgaggtttcaccttattggccaggctggtcttgagtgtgtgggtagttctatgcaaatttatcacatttgtagatttgtgcaatgaccagcatgatcaagatgcagacccattccatctccgtatggctccctgctactatcctacagtcacgagtgtttttctctgagagggtctttatcagggaaaactttttttattttgaggaggccaatgtattaatattttttttatggattgtgcttttggtgtcaagtctgaaagttctttgcctagccctccttcctatattgccaatttttctaaaagtcataaagtttaatgctttactaaatgtaactctactatctattttgtgttattttttgtataaggtatgagatttagatcaacgttcattttttgtggcttgtagttgtccagttgttccaaagccatttttggaaatgtgggcatattgttaaaaattaattgggcatgtttctttgcatctttcatttgctattctgtcccattgatcactgtgcttattcctccaccaacaacaaactggtgactctaatacctgtacagtaactcttagcatcatgtagagtgattcttcccacttttatggatgtattttttcagatttgttttagctcttcctggtcctctgcttttccataaaaattcagaatgagtctctcagtgtctataaataaacatgctgttattttaacaagaattgaattaaatgtatagatcaatttagggaaagtctttatcttcactatgtttggtctttcaattcatgaacatagtatgcctctccatttccttagattttctctgattgcttttagcaatttgtagttttcagcatagagatcctgtgcatgttttgttggatttacagctaaagtatttcatttttgttggagtgattgtaaatgatattatgtttttcttgtattttcagatattgattgttggtacatagaaacatgcttggcttttgtttgttgatcttgtatcatagaaccttgcagagctgacttagtatttctagaagtctttttgtatattcttgagattttatacattgacaattatgtcacttgaaaatagagacaattcttttatttcctttccaatctgtatgccttttaattctttttcccagtataatgtcaaataaatgtgttgaatttttgaattgttcctaatattaggaaggaagcatttggtctttcatcatcaagaatgatttagatgaagtgggtttttttgtagattctctttatcaaatggaggaattttctctccctagtttgctgaatttttaacataaaagagtactgtaagtactcattataaaacaaaatatggctgtggaagatgaaagagagtttcaagcatgctggcttgataggccagatccaagctggcaaaaataattatctctttcttctttttttctatccatggaataaaaaattaagaggaaagaatgttaatagaatcgcattatttcttcaaaatacgttgtgagttttaaaagtattatctaccttttttattatactttttttagggtacatgtgcacaacgtgcaggtttgttacatatgtatgcatgtgccatgttggtgtgctgtactcattaactcatcatttaacattaggtataactcctaatgctatccttcccccctctccccaccccacaacaggccccagtgtgtgatgttccccttcctgtgtccatgtgttctcattgtatatttttttaaatctaccacatcaaggcacctctttttcatgttgcccatggtttaggtgaacataaagacagagctcgtctgaggcaacatacagtccaacaaagccacctgcctctctgtctccactctctctctacactgcacgcgtgctaggtgttgatcctgtctattccagtggaagaacaggttccgtaccatgtggagaatttgcatgtaaaaggagactgggatatacaggctggagaccacatcaggtggctgggcatgtgggataaatcctattgagcatctgtcatagggcctgtcacttagtagacagtcactaaatatttgttaaatacatgatgcctgtttaacacattttctacaaccatggagacctccacaactgatgtaggacaaaatctttctgctttgaactctagcctttcgggccagtgggatttatgaaaaatgccatctctatagctgaggatgaagaatggaagagaatacgatcattgctgtctccaacattcaccagcggaaaactcaaggaggtatgaaaataacttgggttttaattagaaacttaaagaatgaatcaggtggggacaggtagaaagtaagatcagagttcctttccgaggagtagtctgctgaatttgagcttcctaaaaatagtctttttatgtacagaaaacacatcataaaattcattacacaatgtcacttattgttccatgccaggcaaagtcatgtccttctgggacttatgtctgcacatttaactatgggtggtgttgtgttttgtgcttagatggtccctatcattgcccagtatggagatgtgttggtgagaaatctgaggcgggaagcagagacaggcaagcctgtcaccttgaaacagtaagtaggagcacagccatggggttctgagctgtcatgagcccctccagctgcctgctatggagctgatactcccgctgttgggttattccagtgaccagacaaaaggagggctgtggtaatgcaacttcaatgggtctcccaagatggggcagctccgatgaggaggtggggcagctggaggaaaaggatcttctcccctgtgcacagaggtcagggtttacatatctgttaaattgtcaccttggatattctggaggactaaatacatcctttagggggaaaagtgtgattgtatcaaagttttaagcatggagtgtatgggatggtggaaggggaaggcacttggtatctgttggttggcagtgagtagggtgggaaagttataatggagaacttagaataactttgatcatttcatgttttttttctgagggtatcagtagaatactaaatattaaacattcccaccatttctttttcctccagtctcaaagagagagggtggtaaaaacgctataggtggggcaagcctattatttgctgtctacacttatgcaggaacaacaggtgtaatctgagcctgtcctgggcagacaggggatatgtggtcactcactatagaagtttccaaatcaaattttgagagttttttttaaccaggacatcatttgtcattatattttacaaaaataattctgccatcagggcaacctcagctcaccacagctggggatagtggaattttccaaagcttgagcagggagtatagagaataaggatgatatttctaggagctcaggacatggtactgttgctttgtaaagtgctgaagaggaatcggctctgggcatagagtctgtagtcaggcaatgtcacctgtcttgagccccttagaaagagtgaatttttctactcttgttctgctgaagcacagtgcttacccatcttgtatcatccacaattaacacatgctactgcagttgtctgatagtggatctctgtctttctatgactaggctccttgacctcagaggtaagtctaactcagttgagtgtctccatcacccccagcggagagccagctgtgtcactgacacctgataatcaccttctgagggagtgtgatgggagatgctccagtaaatagttctgaaagtctgtggctgtttgtctgtcttgactggacatgtggatttcctgctgcacgcatagaggaaggatggtaaagaggtgctgattttaattttccacatctttctccactcagcgtctttggggcctacagcatggatgtgatcactagcacatcatttggagtgagcatcgactctctcaacaatccacaagacccctttgtggaaaacaccaagaagcttttaagatttaatccattagatccattcgttctctcaataagtatgtggactactatttccttttctctccctctctcttaaaaataactgctttattgagatgtaaatcaccatgtaattcatccacttaaaatgtacagtttaatggtttgtagtacatttgaagatatgtacgaccatcaccattgtaaactttaaaacacttctgtcattctagaaacctcatacatgtttagctatcaaccccctgccagaaatcctgttgtcgtatataaccactagtcaactttctgcatctatagatttgcctattctggacacttcatagaaatgatattaatttttcagggtttttttaattctctagttcatgaatttgtactttagtctgtattattttctttcttctgctggcttcaggcttagtttgcccttctccgtttactgtgttgtggcatgaatgtagattattgatttgtgggtttttttcctctaaatttagacattacaactataaatttccctctgggcacttgtttgctaaataacatgacattctggcctatcacatcttaatttttgctcagctcaaaacagtttctatttgcccttttaatttctacttcaacttattggttgcttaaaagtttattgtttaacttccacgtatgtgtgagtttcccaattttcgttaccttattgattttagctttatcctatgataggtgacagagatacactgtgttatttctatctgatttcttgaacagcatgattaatttaagcagcaaattatgatttgggttatcctaagagaccctagcccaatacataaaggcaaagagattagggcattgaattttgttcctttcatcattcaaaagatgcagaaggggctgctgatctcactgctgtagtggtggtccctatgcacagaccttcccttgctcagccactggcctggaagaggggcaaaagtcatagaaggaatggcttccagttgagaacactgatgtatttcactcttctgattggtagagaaaattagaattgctccaggtaaattttgtatgttcacaatggtttcgttttctgttggttttttttttctacagaagtctttccattccttaccccaattcttgaagcattaaatatcactgtgtttccaagaaaagttataagttttctaacaaaatctgtaaaacagataaaagaaggtcgcctcaaagagacacaaaaggtaaaacgtggtggtagttataggaggatgtttagttttcataattttttagaaatatacatatgatcggtgcacttccctgtatgtttttagagaaagattttaacataaagagtacttatgtttagagcaagataattcatttggtaggaatgcagaaagtggagtttgaggaaggagatatgagaatgagtcagagagagcacttaaaatttgatatcaggcacaagaattagtatgccatgacataaatattattcagataaaaccttatcacagcacttcccttcaataaattgtcaaaggataaacattactgtttggaaatacattttattggtattatgctttctctagatcatagattggtaaagagtcatttcaagtacaaggctattattttacacattctccaacaaaaggtcctatcaggccacctgctgaagtgtagtgtgtgttacatttgagccctctgacagcctcgagtgaacagaggtcttctctgggaattgaggctgcaaggctggctaactcagctttgccttcatgagccctggagtccagccaaaagatatctgcaggtcaggggggcaagaaggggtaacccaggtgtcactgaagattgtatagatttggggaatgttgcagtatttgaaagtgctcccaccaaagctgctgacaagttctggaaatgtcaggagaataatctttgtggacattggtgatgaagaagacagaagaataaaaggcccaggacttcttcatgggtatgcagttaggaccagggaaaagaccaaaaagcaattgaacattttagccagatttgtttcaggaaaacatcctgctttccaaggatttagatggatattccttttcactggtgactcaggcaacacccatcagatttctggtctccaaggggctatattctcagaagggaggttgaggactgcacttctgattaacttctgacttcacgagtcactttctgtcaataaaatttctctttttgcttctagcaccgagtggatttccttcagctgatgattgactctcagaattcaaaagactctgagacccacaaaggtaacaaaagagtgcttctgagggctactggtggggcactcagagggaaggttttgttctgaaaatgtgcaggaagtattccaggtagatgagaatttctgccacatagcagaatgacacaggtttggatgttaaaatggtagctggaggcaacttctagaggcatgcaggcatagatagccatgttctaagcttaaagggcaaccctaaggaaaactggcatgccaggaagagtcagcagtctgtggatcacctacataagatcaaatgccagttctcagcctcctccagatccacagaattaaagtttcttcctggaaatttattaggtttctgcaaaaataattgcaatttttgtgattgctttcaatggcaaaaaccgcaattacttttgcagcaacttaatgcatctaacacctaatcaggagccatgctatccaaataagggcgattttaactggcaatttttggtgaaagtgtgttcaccaggttaatcaactatgaagttattttttcctttgcaatggataagtaactttttggaaaacctctgagactgtgtaaatatcctttgtcttcagtctttcacctaccagttttacaacccatgtacgatttttactgaagtcattgttactatgagtggcaaaatgatggccatgttcagtttcaagccaccaagatttggcaatcatgtcacaaaattcctgaatatttaatcattggttctagagagcaggagtaggctgactttggcatagagatttaaatatgtccatgtctacatctacttctgtctgtctgtctatctatctatcatctgtccatcaatcatctatttatctacttactgattatctagctatcatctctctatctatcccaatacaacttgctgtgataaaggaaagagcctactgttttagtgtttcatctagaaatcactagacacatatagctattgagcactgcacatgtggctagtgccactgatgaaaaattttaagttgtatttaagtttaattgaataaaatttgattttaaatagccacatgtcaatagtggctaccacattggacagcagagctctaaactttgagattatagtttggtttcacatcagtatcatcaggttcatggtaacagaatacaattattagatagttgaatttacccacaactgcatcacagaaatcttcactggtaaatcacagctctgttgacatttctcacactcctttcgtattggttttggtggtgagttacatggttggaacaggcactatatttatttctgtgttcccggtctctaaatgtcctaatccagtcctgatcaaacagaccagtgatgggccatcctgagcttctctcaggaaaaaaatcaagagaggggccaacttgcaatcacaagagcttataccattttaatgccattcatcagactgcaatcaatcaccactcatctagctttttgtccatcttcagttgctgtacatcctgagatagtcaattctgagacctatagcctgggtctattacctggtgcctctcaaagatataatccatacttctcaacctgggctatgcacacaaattaccacatcttgtgaaattcagacttgaatcagtagttcaatggtggggtttgagattttgcatttctgtttttgttgttgttgttgttgttgttttgttttgttttgagacagagttttcgctcttgttgcccaggctggagtgcaatggcatgatctcagctcaccacaacctcagcctcccagattcaagcgattattctgcctcagcctcccaagtagctgggattacaggcatgcgtcaccatgcctgggtaattttgtatttttagtagagaaggggtttctccatgttggttaggctggtcttgaactcctgacctcgggtgatccacccaccttggcctcccaaagtgatgggattacaggtgtgtgccaccatgcccagcctttgcatttctaataaggtcacagatgcttatgatccacggaccacactttgagtagcaagaggtggtctgtattccaatattggtctcttaagttccctcaaacatatctaaaggaaaggtcctttaattttccatacatctagccattaatgttgcaaattctctcaaagtttgtcaaggtatattgtagctaaaatgaattacatttttcttgggagagaagactaccccatattaatttacaataaagtacttttaggatcattcaaggagcacaccatgacactgagtatgttatgcagaaatgttctctctggaaattacccagctgtgaaggtggcagggatggcacgaggaggagcggatggtctacgttcttgaagacattgggggaaaactggattaaaatgatttgccttgttctggctctgtaagacacacatcagagtgaaaccacccccagtgagactctgaattgcttttctattttttcccctggggatttgaaggttccacttagatttcttttcatctaaactgtgatgccctacattgacctgatttacctaaaatgtcttttctctcctttcagctctgtctgatctggagctcatggcccaatcaattatctttatttttgctggctatgaaaccacgagcagtgttctctccttcattatatatgaactggccactcaccctgatgtccagcagaaagtgcagaaggaaattgatacagttttacccaataaggtgagtggacagtacatggagaaggagggaggaggtgaagccttagcaaagatgcttcctcaccacttcccaggagaatttttataaaaagcataatcatgattgtttcattcacaatatgtaggaaggctctcaaaataaaaagaaggaagcatagggaatggttgctattggcagaagtataagatctttgtaaaacagtcctctccctggttcatctgctttctgttaccacaataatgctaagtaaaaaaacatccaaaaacctccctggcatttaacaatatgcatattgctcacacgtcttgatagtgagctctgctgatattggcaggacttgctctggtctggctgtgatctgatggagcctggccctgggtgcgctgtgcaggttgactcagctctgccccacatgtgtctcatgtttcagtcaggtaaccactggtgaagaagcaagctaggaaccagggtatctgacttctgagctaaactcttaaactctataatattgcctttcaaatataacactaagtactaggtgcctatcaaccacactgttttcagacctctgccaaaacttggattctttgtgctatgaagagacatggcttttgggctggtctttgtgtggcagtgaggtgagcacaaagggatgttcttcagagattacagtccagccctgaagcaacaactaggagactgtttcagcaagtgaggacagggctgtgtggggttctatccttttcataactttgcctggcactgaaatcacatgctctgataacatccaccagaactttcttttgtcatatttgggatagaaagggactagtttttcctcaaattattgatagagattttatataatatagtgtttctctccacattttatgtatataacaaaagccctgcttttgtgtatatatgcatatatatatatatacacacacacacacacacatatatataatacaaatcctgctttgtaactgtttttgtttgtatatataacaaaaagagttatgaaccagaagtttggccaataatccttgtcgcacagagaatttgctttttctatctgttttcactttcttggttacagacgtgtaacctcttttttgaatggtgacaatcactttgtcatattttatttgatgctagtggtcatagcctattagtcatgtttgcttccatgagaaagaaaaaccactacatggttatgctaaggatttcagtcattggggttagagccttcccgaatgtctcctgctttcataactcctccacacatcttagtgggccattgagcacatcaaagggcatgacagttattaaaatactttatgaatgctacaatcctttgccagtatgagttgttctctggaacttctaacagttcaacagtactacatggactgagttaaaagttaattcaaaaatctcaatttatccaaatctgtttctttcttttcaggcaccacccacctatgatactgtgctacagttggagtatcttgacatggtggtgaatgaaacactcagattattcccagttgctatgagacttgagagggtctgcaaaaaagatgttgaaatcaatgggatgtttattcccaaaggggtggtggtgatgattccaagctatgttcttcatcatgacccaaagtactggacagagcctgagaagttcctccctgaaaggtaggaggcccctgggaagggagccctccctgaaccagcctggttcaagcatattctgcctctctacaggacagtctgggcttgtacaatcatttgcttgtctttttatgtttaaaaggttttttcaaatcatgaaattgatcattgtcacactttacaaaccacagactagataaaagaaaactatagccagtcacagtcccagcaacttaagatgaaggtcctcaattatgtccttatgggtcataagtgtccaaaatgtaaggactcttttaaaaacacatgatcacaatgctattattatgtcccacaaatgaatattttttcctgaatataatcaaatcttcaggaatcaaatttgaataaaaaacatgcgtctaatcttcaaagaatttataggttagtgcaacagatagacaaagaaagcagtgatgacactgctttccatcaatacagtagcatcatatgcctgtgtaaattatctgacttaaactattctatggaggtgtgggggagaaagaaggagagatggagattagaagaaggaggagaaggaggagagaaggaggggtaagacaaggtagggaggagaaggaggagaattagaaaaacaagagacgagaggagaaggaaagtgcaaaataacaattttgaagtagtgcaagacaatttcttctccttcctcatgaccaacataagggtgacttgaggcaggaatctacttttctgtcagtcattctcatcacttatgtgccttttgtagtgtgaacacatcaccatcctgactataatttgagtgtttagaaataaatatactttgcaacagtatttatctcctctcaacaagactgaaagctcctataatgtaaggagagtagaaaggatctgtaccttacaattctcatagcaaaatatgcatagcaggatttcagtgactagcccacaaaagtatcctgtgtactgctagtagaggggtgggccctaagtaagaaaccctaacatgtaactcttagaggtattatgtctttaacttttaaaatatctaccaatatggaaccaggttcagtaaaaagaacaaggacaacatagatccttacatatacacaccctttggaagtggacccagaaactgcattggcatgaggtttgctctcgtgaacatgaaacttgctctagtcagagtccttcagaacttctccttcaaaccttgtaaagaaacacaggtcagtcaattttctgcattaataatgttttattaacaattattttaactgaatggtctatatatttaaaaaagaatacactcacttaatcttttaataatttgttctatgggccaaggaatctatttggacccatctatgatctttaagggtgcttcagttctggagttcaaaagctgtagcattaaaaacatcatgcaatgtcaatgtagactagcatgacatgattatctacagtctccttgaacttgagcaaaattaaattcagtttcaagtcaattggaaagatggggaagtattttgcacaatcatgaggtgcacttattatcttgttttgacttttgaatgatgctcttccttcccagaacttgtagaagttttctcatgacagtggctcccaaccactagctgtacattggaatcaccagggagctttaaaaattcatgatgcctggaacatctcagaaattctaaactaatttgcccagagtgtggctttaaaagctcccccattgcttctcatgtgaagccaaggtggaaaatgactaatttaaggtagttctattggatacgaaggactaccacagtccaaggccatccttactgacctcaccttccaggtgcctagctccaaccaactgggctccttttcaactcaattataactctgctaatcttctttcctttcttctcctcattctgttcttatctttcaagtcctaattcaattcccaagcccctccaaggtgtcttcttgacctagtccagggctcatttactcctctgctctgttattagttactggaggctattatcttataatttcataatttgccattaaatcattgagttttgttctctatattttctctttatctaagaatgtcttcccccctccattaacaatatcctctcattttattccatttaaaatatcccagtggtgccttgcaagtgacctcatctaactcaagcatttggtcatttggtaaatgtttaaggagtgatatgcagtcgattggtttgcatacaaatattaagttttttaatgtgaacatttagcaaatgacattcatgtatttgcatgtgtgtgtgcttgcacatgtgcacatgcatgtctgtctgcagggaaaatatattcatgccttttgaaaatttttaaataatgtgttatatttatagaaagatttggaaccttttctctgaagaagttaaagaacagatgtcattgattcatattaagcaagaccctataaatcttatttctaggtctcatgtatttattaagcaactccacaccttaagcaggctttctacatagaagaggaagaagatagagatggtttccatattattttcatattccacattatttgtggctttaggccagctatgtagctatcctgtatgtgtgctcagacaggagactcagccctgagagaaggcggtcctctggcacacctaggatggggaaggtactcccttggaagtcccaagctggcacttctggatctccatggcaattttcttgcccatcactccatggagatcagaatatcactctattgtgtcccctcaacactgaaggagtgtctcaataagaaaagttgagtcaaaacactgtaggaattgagaggttccccacttgcactacccttgtaaaccaagagaagatgttaaaaaataaaacgataatgcttcctgaaggtgtcttcccatctttacactagatgggttcaattgagaggaattactggactgtggaagttgaagactgtccacataattaaaatgtacaatagctactcaggattaccttgcaagtttcaacatacacaaaattaacttcataagatggtttaaaaagtttaccgttatacctaataatctggtttaaatttttaaaactcatccattttcgttaaaatttaaatcaaaaaagaacacgggttcccatgaatttgtctcaggtcaaacctcacacagaataggtgctccatgaatattttgttaaatgatagatgatgaatgttctcactatccaatcttcacacatcttatagagtaagtataacgaatccaagatttatagtgctgaaagtagtttttatatgtttacaaagcattattgtcagtaatttttttttactttgatgctatactttctacttttgctttatttaatgcttctcaatatgctcgtttaactgttgcagatccccctgaaattacgctttggaggacttcttctaacagaaaaacccattgttctaaaggctgagtcaagggatgagaccgtaagtggagcctgatttccctaaggacttctggtttgctctttaagaaagctgtgccccagaacaccagagacctcaaattactttacaaatagaaccctgaaatgaagacgggcttcatccaatgtgctgcataaataatcagggattctgtacgtgcattgtgctctctcatggtctgtatagagtgttatacttggtaatatagaggagatgaccaaatcagtgctggggaagtagatttggcttctctgcttctcataggactatctccaccacccccagttagcaccattaactcctcctgagctctgataacataattaacatttctcaataatttcaaccacaatcattaataaaaataggaattattttgatggctctaacagtgacatttatatcatgtgttatatctgtagtattctatagtaagctttatattaagcaaatcaataaaaacctctttacaaaagtattattggatgtttcctgcacattaaggagaaatctatagaactgaatgactgagaaccaacaactaaatattttgatcattgtaatcactgttggtgtgggaactggagtgcagtggtgcaatcttggctcactgcgagctctgcctcccaggttcacgccattctcctgcctcaacctcctgagtagctgggattacaggtgcctgccaccacgcccggctaatttttctatttttagtacagacggagtttcactgtgttagccaggatgctctcgatctcctgaccttatgatccacctgcctgggcctcccaaagtgctgggattacaggcatgagccacggtgcccagcccaatttgattattaacataggtgagagttaacccactatgactttgcccattgtttagaaagaatattcatagtttaattatgacatttttgatgagacacagtggctcacacctgtaatcccagcactttgggaggccaaggcaggcagatcatctgaggccaggagttcaagaccagcctgaccaacatggtgaagccccctttctactaaaaatacaaaaattagctaggtatggtggcacacgcctgtaatctcagctacccaggaggctgaggcaggggaattgcttgaacctgggaggtggaggctgcagtgagccaagatcatgccactgaactccagcctgagtgacagagtgagactgcatctaaaaaataaaattatgcctttttgtagcacatatattttgtaacatacaactgaagccagtattatattattagttttcatttaatgttttcagcccatctcccctgatatttctgggagacaggaaatatgttttcttacacctcttgcattccatcctcaactcccaactgtctaaatgcaatgaacatttaataaaaaaaacagttgattggtcaattgattggacaacaaggctgaaactactcatttcttttcttttcctatttcttcctttattttccctttctgaataatttagccctagagccattaggtgggtggcagccagatggtggccacacattaaggtagagaagagagtcatggtggttccaagtcagagaccaagtaggatgaggacaaactgggtgttcatgtggaaacagcctgcctgggtgtgggagtccaagcaagcagagaaggggttcatagagaggtgtggcctacaagagcagccagagcctaaatagagcatggagaacccatgtgaggtcaggagggcatccatgagtgggaagtgatgggtgaggtttggttacataaaggggatttatcaaagaagtaaatatattaaggatgatagaagccaggcttctcatctttgaagaacggagtcatggattcagaaagggagaaaactagcatgaatcctatgaaattagattggaatggatgtattcgtgtatattcatacccttctagatggatagatgggtagataggtgatagataacagatatatgatagatatatagatagatgaaatgtatacatgtgtttgtgtgtgtgtacaaaaaaaaccatatatttcctacttctcttcactgataggtctaggtaacaatgacatttcaatagcaatgagcacacttagcgcccaagtcttggcttatgaataccatattccatggaaaggaaccagagctctttagagaaatgcctgattccagggccagggttaagaaggttcaagacaagcctaggacacattttgtgccaggaagcaagaaaatgttcaaatgatttccaagtaatgtttggaaatgatatttgaaaaagaccctccaaatgataactccaaattattttcaaatgatatttgcaaaaacctaaagactccaccaaggaactattagaactgataaaatattcagtaaagttgcagttgcaggatacaaaatcaacatacaaaaattagtagcatttctatatgccaatagtgaacaatttggcaaaaataaaaaagtaatcccatttacaatagccacaaataaaactaaatacctaagaattaacttaatcaaagaagagagagatctctataatgaatactgtaaaacactgatgaaggaaattgaagaagacacaaaaacagaaggatattccatgtttacatattgtaagaatcaatattgttaaaactgtccacactacccaaagcaatgtacagattcaatgcaatccctcaaaataccaattacattcttcaaagaaatagaggaaaaaattctaacatttctatagaaccacaaaatacccagaatagccaaagctatcttcagcaaaaagaacaaaactggagaaatcttattacctgacttcaaattatactacaggggtataataaccaaaacagtatggtgtttgtataaaaacagatacattgaccaatgaaatagaatagagcacccagaaacaagtccacacacctggagtgaactcatttttgacaatgttttcaagaacatacactggggaaaagacggtctcctctggtgctgggaaagctggatatcaatatgcagaagaatgaaactagacccctatatctcaccagacacaaaaatcaaatcaaggtggatgaaagactgaaatctggccaaacacggtggctcatgcctgtgatcccagcactttgagaggctgaggcagacagatcacttgaggtcaggagttcaagaccagcctggccaataaggtgaaaccctatctctaccaaaaaatacaaaagttagctgggcatggtggtgcatgcctgtagtcccagctactcaggaggctgaggtgggagaatcacttggacccatgaggcataggtggcagtgagccaagatcataccaatgcatgccagcctgggcaacagagtaagactctggttccaaaaaaaaaaaaaaaagactgaaatctaagatctcaaatgatgaaactgctacaggaaacattgtggaaactcttcaggacattggtctgaacaaaaaatgctgaagtaataccccacaagcacaggcaaccaatgcaaaaatggacaaatggaatcacatcaagttaaagtttctgtgctgcaaagaaagcaatcaacaaagtgaagacgcaaaccacagaatgggagaaaatattttcaaacactctgacaacagattaacatccagaatatacacagagcacaaacaactctttggaaaaaattcaataatcctaataatcaaaaaatgggcaaaatatttatacagacatttctcaaaagaagaaatacaaatgccacatagttatatgaaaatgtgctcaacatcattgatcatcagagaaatgcaaatcaaaactacaatgtcatctctccccagctaaaatggttttaatccaaaagacaggcaataacaaatgccagtgagaatgtggagaaaagggaattctcgtacactgttggtgtaaattattacaaccactatagagaacagtttggaggttcctcaaaacattaaaatggacctatcataagatccagaaatcccggtgctgggtataaaccaggaagaaaggaaatccatatattgaagagatatcttcattcccatgttcccaatagctgctattcacaaatgccaagatttggaagcaacctacatgtccatcaacagatgaatgggtaaagagagtacttcacttatgcacaatggagtacaattcagccatgaaaaaagcatgagatcctgtcctttataataacgtggctggaactgcaggtcattatgttaggtaaaataagccaggcacacaaagacagacattgcatgttctcacttatttgtgggatctacaaatcaaaacaattgagctaatgtctgggtcttagtcaattttgtaccctaagtacagggagcacagccattagaatacatgatgaatgctttaatacaggaatgaataggtgagaggcacagggtggttgggtgttcttctgatacatagtatcttccttgacacattcagtacaactctcaacaggtaagtctcttcatgtatgttaccttctgaggaattaagtggcagaacatgccttctattattttcctttgcagaacaagaccaattgcattagttgggaaacagtgctggctgcatctgagccccaagcaaccattagtctattgctatcaccacagactcagaggggatgacacacaggggcccagcaatctcacccaagtcaactccaccaacatttctggtcacccaccatgtgtacagtaccctgctagggtccagggtcatgaaagtaaataataccagactgtgcccttgaggaactcacctctgctaagggaaacaggcacagaaacccacaagggtggtagagaggaaataggacaataggactgtgtgagggggataggaggcacccagaggaggaaatggttacatctgtgtgaggaggttggtaaggaaagactttaatagaaggggtctgtctggctgggcttgcaaggatgtgtaggagtcatctagggggcacaagtacactccaggcagagggaattgcatgggtaaagatctgcagttgtggcttgtggggatggatttcaagtattctggaatgaagacagccatggaaacaagggcaggtgagaggatatttaagaggcttcatgccaatggctccacttcagtttctgataagaactcaggttccgtggactccctgataaaactgattaagttgtttatgattccccatagaatatgaactcaaaggaggtaagcaaaggggtgtgtgcgattctttgctactggctgcagctgcagccccacctccttctccagcacataaacatttcagcagcttgacctaagactgctgtgcagggcagggatgctccaggcagacagcccagcaaacaacagcacacagctgaaagtaagactcagaggagacagttgaagaaggcaagtggcgatggacctcatcccaaatttggcggtggaaacctggcttctcctggctgtcagcctggtgctcctctatctgtcagtaactgtccagattcctctcctctgttaacttggacttggggtgctactcaggcccctgttccctcatctgttttaaagatcaaaagagatgttcaaggaggagtagcttcttggatgctacaaacacatagaggttattattgatcttatgcagatttatgaagaaataaataagcatttgtcccagccaccttctaattttggtgactaggagggtttggggacagcatttgttagtgggaatgatttgattagcttagatttgacctatactaatcaatgaaaatgaaaacccagcaaaggcagattacaaactgctgaacaagacgagaagtgtgatcctcatccccttcccaggttctcgggattctgggggcaggagggagcagcttgggtttttgtctcattaccttcattttctgggttctctgtctgctggaagagatgtgtagaagtttttcctctgtggacctggtggttcctgctcccctaacttccaccccaggatatcatttacataacacaccggggaacaccaagacttcacgggaagctgtcccctggctctttcctctttcctgtgccatgtcccaaaacatcccctccctcctatgactcactcctccaccctgtcatacacagaactatttaccttgcaatgattaatctccagagcaaaggagacttggaggaagttttgaagatttattctttgctttaatctttttcctcccgtctctgggaggctagcattaatatagagctttgtttctcagctaatgggaatctgctagcagcctgaaaaggcaggagctgtgaaagccaatttggattttacacattttttcccctttgtgttacagtaaaggaggatgaaccctctcactggtgggactcctggcatcctagagcaggtggagagaagagttactttccactgtggttagtggaggctccacctgtcccattaacttctacctcaatttgacttttaagagcaggcaacaacaatgacatgaaaataggaaatataaacttcattttaattttttcacagaaagcttaggaattcagtgagttgtggcaacatggtttccattgtctaacattttaaaatgaattgatatggtttaaattcattcatttttaaatcagaattttttggagatggaatatttccagcatgttccttctgggtgatgaaagagggctgttagttcagtatttgtgacaataaatgtgtgtaaaataacatcacctctccagaataatgtcaggaatatgagtctaaagcatgaatgtatatcgctaagacaagactgcgatatacatatttatgtatatctttttatatttaaaaagatatgtctttttaaatatacatgtctgacagtttattttaatacctcctttttgaatatacctgcttagcaggttatcttaaactgtcaggcaggggagtaagcaatactgtgagctagtgatgatagcaaaggcatccacgtaggatccgtatgaagtaagaaaatattcctcagctctcagggtagaactccaaagagatattcatgggtcctggccccacagtggaggtcactcaaaaggcaaacaggttggcatctcatctgcttcaagcctggacacagggacatcaaatgtgtcactgtgtgcgtggtctgccatgttgtggggcggtcactacagactcgggcagccaggcagacaatgccttagccttagacaatgctggtgcagcccaggagtcagaaactgtagtgtagaccatgccctccttaggccaacacaattacgtgcaatagatgactggcttttctgttagcctcttcattggaaccaaaagtggtattactctaccaaacagaggggagctggaaagaaactaaacagtttgcccagcacagcctctgccttgacatggaaccatgtgagtctagacactcacctagatctttccttgggggacagtgctgctgacagattaactcaatagtttgtcctgacctgagagatcacgtaacttctagaaagtgtagaagcagagattagtgtcattgatttgccatagctgtgacaataaaagaaggaacaggagtagaaaacccaaggccaccctagtttcagtagatggtgcacacatttccactaactattctggggcaaggatccaaatgcactatatgctgcctctgctgggatctccaaacacgaccctccatgccatttctcagttgtattttaccacatattatcagagtcactggatttgtacagaatgtttggaacctatactgccttaagtgctacccattatagaagagaaaacaaggtcttcattcaactgtctggaacattttatgtttacttatgtggaatactgtaccttttgctatcaacaggaaggtacctggacattagaaggtgcctgtctttcagctgaaagcacacatgacgcatatggatccatttatatacaccatacttttcagccacattttcctaatttgcctctctgggaccaaccttgtgggactagcagattcacggttgagttgatggctggtgatgtctgccatcagcctttcttcttcctccagtcttccacccctcagtaacatcagactgggaaggtcttcagatatccagaaccctcagttgggggagtccatacatgacccatcaaagatgagttgcaagcaggcctgccatagggagcagcagccttaatgggttttcctacagagatacttgatgtgcagaggcaataaactgactgctttgtgattgatcaccttgaaaaaagtaagcatatctgggtgtattagtcctttcctacatcgctgtaaagaaatacctgaggctgggtaatttataaataaaagagatttaattggctcatggttctacaggccctacaggaagcatagcgacttctgcctctagggagccctcaggaaattttcaatcatggcagagggtgaaggagaagtaggcagatattacatggctggagcagaagcaagagagggtggggaggaggtgccacacacttataagccaccacatctcataaaaactcattgtcacgaggaaatacccaaagggggttggtgtgaaaccaggagaaactgcccctaagatacaatcgccttccatcaggccccaccaccagcattggggattacatttccacatgagatttgcgtaggggcagattcagaccatatcactggcagtgtgcttattatcaggtgaataccaccagttggaaggctagattccacaagaggaggaatgtcctggaaattggttttttaagttgtggatcttctgcacactgtcattcagggaaatatgagttaatcatcctccccaatagcgcaaatcaaccagatcatctggccacagagactgaggtgtagctgaaaggtgcttgcatttctacgaggccaatggaagccttcagcacagttgtcaatctgtagaaataaggactctgtgactcctctgacacccctctatgaatgacagtttaagaagggccagatcctaaaatagggtcagagcttagagggaaaggaaagtataaaagactcttcacaaattctaaagacatggtcaccataggctctcagtgaccctctgtgactgagtggatgcagtgatgcaaaatctcatcatcactgcagaagagaaaaaaaaaaaaaaagtcaccctttctgcctaggatgagaatccccaaatcagggaagagtccacttactaaatagacataaggaaatgaagtgccctggaagaattccttcctgaacctctgaggagcactcacgtttgaggacatttatcaagtattcattccaggattgggaccataaagacttctgctgctttcgactaatcattgtgactttttggtgtctcatggtggagacgggaaaggacttgatgtacaaatataatcattgctgtcagagttactgttatcatttattgccttaatgttacctccttctcttgagcattccagttcctcagtcagtgacttaccagcccccatatctataaagtcacaatccctgagacctgatttctgtttcagtttgtagatatggagcccattcacatggactttttaagaagcttggcattccagggcccacacctctgctttttttgggaactactttgtcctaccatcaggtgagtgtttttgagctcactctttggcttcttatgattggagagagcagcttagttccatcagtaaaactgcttctcctcaggaggaaggtctgaggttttacactttcagaaacagtgtataggcatcatccagagcatggcaaggtttaccccgggactctcttgctaactctcaggaacctcaggtttgcctcagttgaacagtccaaatctcaggtatatcggcaacctgatgttcagaacttgatgtgcagactttgtgagcaccataaagaacatttttcttttgccccatgtaggttcccaggaaggtacagtcatatttagttagtattaagagtaggaaaaggagcccccatttgtggcttgctatctgtgtacatgagagtcaaactttcctctctatagcaagagctcaggagtagcctttttcccctacctcctggacagctttgaaactcactttattagggagctcaagtatttaccattgggtcattcgcacttgcttgaatcctctccaaaaaatgctaaatcccctgaaggtatttccatggctctaccccagctcttactccccatgacatcttttgcagctttgggagtcagagcaaaggtgttctgctttacttcttttatttcaaaggctgcaccttatgggtgagtctgagcagggagtggatataactgagatgagatagtggttatctatcaaactcagatatttaagcataaaatgaatttgtggttttttttttaaacaaaggcagaatcatatgcaaaatcactagaaaggtgataatttgatgaaattattaaatatttaattttgctgaataaaatgtcatatgtgccacatggactgtgaactttggtcgagcctttgtgcctaacctggtctgatgctctgtctagggcctggcctctggatggaaaattatgagcttatctccacagggccagcagcagcagtagtcagctctgtggcttagatcatctttcccgcatacctgaggcttgtttccctgattccaattcttccaagtgagggttttgttgtctaattactgcccaggaatttcatatttttccctttgcaaaagcaataatttccccgccaccttttctaggtcagttctttagtagatgtaccccccaagataaacattcctgggatctttgtttgcacaggtaaaacatcaaccctgaaatgtagaaaacaggaaagtttgtttttcagtttcagtgaaaacgctgagcaagtgttgtaatttgctgtgtccaatgtgtagaggggacattttctcagaacttccatgttaagctggaaaactggaaagtgagtccactttgtcattctgtcactcactccttttctcactcaacaacatgcctcagacttatctaaatctgctagactaaaagaggtccctgatgtctgtaacttcctaattctgctagaattctagagcgagctgatgaaataaatgaaaaggatgatgaacagagataaaagactgtgcattcccttctgacactcactctctttccctcagcctcagtttccccatgtgcccctggaggtgatcattcaaggatttatgagattttagagacaatacatgaaaaagcaaaaaggcatcagaaagacaaggagttacctagtttacacacaatgataagtcattcagtatctacagcactttgagaaaattcaagagtgattttaaatttcccatttcaaatacctcctctgttttctctcctttcccttatgatgtctccaaataagattcctctaactgccagcaagtctgatttcattggattcaactgttttcagccccaattagacgcagggttaagtatatttgaaatattaatcaagggaagcatttccaagatggccgaataggaacagctctagtctgcagctcccagcaagattgaggcagaagataggtgacttctgcatttccaactgagtcttagcaacaggcagaccaggagataccctcccgtgcctcgatcggcaggtgccacacccacggagacttgctcactgctagtgcagcagtctgagatccacctgatatgctgcagcttgatagaggaggggtatcagccattgctgaggcttgagtagcttactgtgtaaacaaagaggcctggaagcacgaagtgggtggagcccaccgcagctcagcaaggcctactgcctctgtagattccacttctgggggcagggcagagtagaacaaaacacaggagacagacagcctctgcagacttaaacgtccctgtctgacagctctgaagagagcagtggttctctcagcacggtattcgagctctgagaacggatagactgcctcctcaaatgtgttcctgacccccctgtagcctgactgggaaccactttccagtagaggccgacagacacttcaaacatgcgggtgcccctctgggatgaagcttccagaggaaggatgaggcagaaatatttgctgttctgcagcctctgcaggtaatacccaggcaaacagggtctgaagaggacctccagcaaactccaaaagacctgcagctgaggagtctgactgttagaagaaaaactaacagacagaaatagcatcaacatcaacaaaaaggacatccacaccaaaaccccatttgtaggtcaccaacatcagagaccaaagatagataaaaccataaagatgggaagaaaccagagcaaaacagctgaaaattccaaaaaacagagcatctcttctcctccgaaagatcacagctcctcaccagcaagggaacaaaactggacagagaatgagtttgatgagttgacagaagtagtcttcagaaggtcggtattagcaaacttatccgagctaaaggagcatgttctaacccatcacaagatagctaacaaccttggaaaaaggttacatgaatggctaactaaaataaacagtgtcaagaagaccttaaatgacctgacagctcaaaaccatggtacaagaacttcgtgatgcatgcacaagcttcaatagccgattcgatcaactgtaagaaaggatatcagtgatcaaagatcaaactaatgaaataaagcaagaagacaagattagagaaaaaaaagtgaaaagaaatgaacaaagcctccaagaaatatgggactatgtgaaaagaccaaatctacatttgacaggtgtatcagaaagggacagggagaatggaaccaagtcagaaaacactcttcaggatattatccaagagaacttccccaaactagcaaagcaggccaacattcaaattcaggaaatacagagaacaccacaaagatactcctcaaaaagagcaaccccaagacacataattatcagattcaccaaggttgaaatgaaggaaaaaatgttaagggcagccagagagaaaggtcggcttccccacaaagggaagtccaccagactaacagcagatctctcagcagaaaccctacaaaacagaagagattgggggtcaatattcaacatacttagggaaaagaattttcaacccaaaatttcttatccagccaaactaagcttcataagtgaaggagaaataaaatactttacagacaagcaaatgctgagagattttgtcaccaccaggcctgccttacaagagctcctgaaggaagcactaaacatggaaagaaagaactgctaccagacactgcaaaaacatgccaaatggtaaagaccatcgatgctatgaagaaactgcatcaattaatgggcaaaataaccagctaacatcataattgcaggatcaaattcacacatatcaatattaaccttaaatgtaaatgggctaaatgccccaattaaaagacacagactgatgaactggataaagagtgaagacccattggtgtgctgtgttcaggagacccacctcacatgcaaagacacacataggctcaaaataagaggatggaggaagatctactaagcaaacagaaagcaaaaaaaagcaggggttgcaatcctattctctgataaaatagactttaaaccaacaaagatcaaaaaagacaaagaaggccactacataatgataaagggatcaattcaacaagaagagctaactatcctaaatatatatgcacccaatacaggagcacccagattcataaagcagtccttagagacctataaagagacttagactccacacaataataatgagaggctttaacaccccattgtcaatattagacagatcaatgagacagaaggtttattttattttattattatttaagttttagggtacatgtgcacaatgtgcaggtttgttacatatgtatacatgtgccatgttggtgtgccacacccattaactcgtcatttagcattaggtatatctcctaatgctatccctaccccctccccctaccccacaacagtccccggagtgtgatgttccccttcctgtgtccatgtgttctcattgttcaattccaacctttgagtgagtacatgcggtgtttggttttttgtccttgcgatagtttgctgagaatgatggtttccaccttcatccatgtccctacaaaggacatgaactcttcattttttatggctgcatagtattccatggtgtatatgtgccacattttcttaatccagtctatcgttgttggacatttgggttggttccaagtctttgctattgtgaatagtgccacaataaacataagtgtgcatgtgtctttatagcagcatgatttataatcctttgggtatatacccagtaatgtgatggctgggtcaaatggtattcctagttctagatccctgaggaatcgccacactgacttccacaatggttgaactagtttacagtcacaccaacagtgtaaaagtgttcctatttctccacatcctctccagcacctgttgttttctgactttttaatgatcaccattctaactggtgtgagatggtatctcattgtggttttgatttgcatttctctgatggccagtgatgatgagcattttttcatgtgtctgttgggtgcataaatgtcttcttttgagaagtgtctgttcatatccttcacccacttgttgatggggttgtttttttcttgtaaatttgtttgagatcattgtagattctggatattagccctttgtcagatgagtaggttgcaaaaattttctcccattctgtaggttgcctgttcactctgatggtagtttcttttgctgtgcagaagctctttagtttcattagatcccatttgtcaattttggcttttgttgccattgcttttggtgttttagacatgaagtccttgcccatgcctctgtactgaatggtattgcctaggttttcttctaaggtttttatggttttaggtctaacatgtaagtctttaatccatcttgaattaatttttgtataagttgtaaggaagggatccagtttcagctttctacatatggctagccagttttcccagcaccatttattaaatagggaatcctttccccattgcttttgtcaggtttgtcaaagatcagatggttgtagatatgtggcattctttctcagggctctgttctgctccattggccaatatctctgttttggtaccagtaccatgctgttttggttactgtagccttgtagtatagtttgaagtcaggtagcgtgatgcctgcggctttgttcttttggcttaggattgacttggcaatgcgggctcttttctggttccatatgaactttaaagtagttttttccaattctgtgaagaaagtcattggtagctttatggggatggcattgaatctataaattaccttgggcagtatggccattttcacaatattgattcttcctacccatgagcacggaatgatcttccatttgtttgtatcctcttttatttcattgagcagtggtttgtaattctccttgaagaggtccttcacatcccttgtaaggtggattcctaggtattttattctctttgaagcaattgtgaatgggagttcactcatgatttggctgtttgtctgttattggtgtataagaatgcttgtgatttttgtacattgattttgtatcctgagactttgctgaagttgcttatcagcttaaggagattttgggctgagacgatgggtcctggacttttttggttggtaagctattgattattgccacaatttcagagcctgttattggtctattcagagattcaacttcttcctggtttagtcttgggagggtgtatgtgtcgaggaatttatccatttcttctagattttctagtttatttgcatataggtgtttgtagtattctctgatggtagtttgtatttctgtgggatgggtggtgatatcccctttgtcattttttattgcatctatttgattcttctctcttttcttctttattagtcttgctagcgttctatcaattttgttgatcttttcaaaaaaccagctcctggattcattaattttttgaagggtttttgtgtctctatttccttcagttctgctctgattttagttatttcttgccttctgctagcttctgaatgtgtttgctcttgcttttctagttcttttaattgtgatgttagagtgtcaattttggatctttcctgctttctcttgtgggcatttagtgctataaatttccctctacatactgctttgaatgtgtcccagagattctggtatgttgtgtctttgttcttgttggtttcaaagaacatctttatttctgccttcattttgttatgtagccagtggtcattccagagcaggttgttcagtttccatgtagttgagcagttttgagtgagcttcttaatcctgagttctagtttgattgcactgtggtctgagagacagtttgttataatttctgttcttttacatttgctgaggagtgctttacttccaactatgtggtcaattttggaataggtgtggtgctgaaaaaaatgtatattctgttgatttggggtggagagttctgtagatggctattaggtctgcttggtgcagagctgagttcaattcctgggtatccttgttaacttttggtctcgttgatctgtctaatgttgacaatggggtgttaaagtctcccattattattgtgtgggagtcaaagtctctttgtaggtcactaaggacttgctttatgaatctgggtgctcctgtattgggtgcatacatatttaggatagttagctcttcttgttgaattgatccctttacctttatgtaatggccttctttgtctcttttgatctttgttggtttaaagtctgttttatcagagactaggattccaacccctgcctttttttgttgtccatttgcttggtagatcttcctccatccctttattttgagcctatgtgtggctctgcatgtgagatgggtttcctgaatacagcacactgatgggtcttgactttttatctaatttgcccatctgtgtcttttaattggagcatttagcccatttacatttaaggttaatattgttatgtgtgaatttgatcctgtcattatgatgttagctggttattttgctcgttagttgatgcatttttttcctagccttgatggtctttaccttttggcatgtttttgcagtggctggtaccagttgttcctttccatgtttagtgcttccttcaggagctcttttagggcaggcctggtggtgacaaaatctctcagcatttgcttgtctgtaaaggattttatttctccttcacttatgaagcttagtttgtctggatatgagattctgggttgaaaattctttcccttaagaatgttgaatattggtccccactctcttctgccttgtagagtttctgccaagagatcagctgttagtctgatgggcttccctttgtgggtaacccgacctttctctctggctgcccttaacattttttccttcatttcaactttggtgaatctgacaattatgagtcctggagttgctcttctcgaggagtatctttttgacattctctgtatttcctgaatctgaatgttggcctgccttgctagattggggaagttctcctggataatatcctgcagagtgttttccaacttgcttccattctccccatcgctttcaggtccaccagtgagacgtagatttggtcttttcacatagtcccatatttcttggaggctttgttcatttctttttattctttttctctaaacttcccttctcgctttatttcattcatttgatcttccatcactgataccctttcttccagttgatcgcatcagctcctgaggcttctgcattcttcatgtagttctcaatccttggccttcagctccatcagctcctttaaggacttctctgtattggttattctagttatccattcatctaattttatttcaactttttaacttctttgccattggtttgaagttcctcctgtagcttggagtagtttgatcgtctgaagccttcttctctcaacttgccaaagtcattctccatccagctttgttccattgctggtgaggagctgcattcctttggaggaggagaggcactctgctttttagagtttccagtttttctgctctgttttttccccatctttgtggttttatctacttttggtctttgatgatggtgatgtacagatgggtttttggtgtggatgtcctttctgtttgttagttttccttctgacaggaccctcagctgcaggtctgttggagtttgctagaggtccactccagaccctgtttgcctgggtatcagcagtggtgcctgcagaacagcagtggctgtagaacagcagatattggtgacctgcaaatgctgctgcctgatcgttcctctggaaggtttgtctcagaggagtacctggccgtgtgaggtgtcagtctgcccctactggggggggggtgcctcccagttaggctgctcaggggacagggacccacttgaggaggcagcctgcccgttctcagatctccagctgcgtgctgggagaatgactactctcttcaaagctgtcagacagggacatttaagtctgcagaggttactgctgtctttttgttcatctgtgccctgcccccagaggtggagcctaaagaggcaggcaggcctccttgagccgtggtgggctccacccagtttgagcttcccagctgctttgtttaccttatcaagtctgggcaatggcaggcacccctcccccagcctcactgccgccttgcagtttgatctcagactgctgtgctagcaattagtgagactccatgggcataggaccctccgagccatgtgcaggatataatctcctggtgtgccgttttttaagcccgttggaaaagcacagtattagggtgggagtgacctgattttccaggtgctgtctgtcacccctttctttgactaggaaagggaactccttgaccccttgcgcttctcaagtgaggcaatgcctcgccctgcttcggcttgtgcacagcacgctgcacccactgtcctgcacccactgtctggcactccctagtgagatgaacccggtacctcagatgaaaatgcagaaatcacccgtcttctgtgtcactcacactgggagctgtagaccggagctgttcctattcggccatcttggctccaccccccgagttttggcttttaattgaaagtgtattgatgtgggaaggagataatgccatgcatttatgagcacatattagagggtctgagacaatgcatgtgataaaaggtcacctaaggaagaaaaaaagaacaagggaagacactggaaagaacgtgatgctgggagtccctgggccaccaaagtctggagaaaagtggtaaccacaaggctcccagcctagtttcactgaagacctcgacactaggtgacttatgggatccttggtaggacaagccttgaaaagttttacaatagcaaatgtggacgttgtcagaaccaaatgatgtcacgtgtgtatttgtgtgtgtgtgtcagtgtgtgtgtttaaaaatcatgacaaataaagcaggctgtgaagaggggattcccatgctcgtgtgcctgataacacaactatcacaaacgctttgcgaaaccacaagtttgcacaaaggcaatcccaaccttacacaaaaatatttctgcaagggcacctgcccagcgactgcctgtccaaccttggtgtggtgtcacccttgttattgatcttttagcaaaggagaattatttcaaaactgatatgaaatcctcctcatattttccttggaacatctttgtcttgctttacctccctgaatttccacatagtttgtaatggtcacaaactatgtgcatagtcagcaatacattttttgtttactttgatgctacagtttctaattttgctttatttaatgcttctcaatatgcttgtttaactgttgcagatcccgctgaaattacgcttaggaggacttcttcaaccagaaaaacccattgttctaaaggttgagtcaagggatgggaccgtaagtggaacctgaatttccctaaggacttctgctttgctcttcaaaaaagctgtgacctagaacaccagagacctcaaattactttgtgaatagtaccctgaaatgaagatgggcttcatccactgtactgcataaataaccagggattctgtacatgcactgagctctctccctgtctgtgtagagtgttatacttgggaatataaaggaagtgaccaaatcagtgcttgggaagtagatttggcttctttgtttctcacaggacaatctcagccacccctagttagcaccattaactcctcctgagctctgataaaagaatcaaaatttctcaataatttcatccaaaattattaatgaaaataagaattattttgatggctctaacagtgacatttatatcatctgttttatctggagcattctataataagtttatattaagcaaatcaataaaaacctcttacaaaagtatcatcggatactttcctgaacattaaggagaaatctatagaactgaatgaatgagaaccaacaagtaaatatatgtgatcattgtaaccattgttggtgtggggcatttgtcagaactccaatgtgattattaacataggtgagaattaatccactgtgactttgcccattgcttagaaagaacattcatagtttaattatgccttttttgaccaagcacagtggctcatgcctgtaatcccagcactttgggaggccgaggtgggtggatcacctgaggtcaggagttcgagaccagcctgaccaacatggtgaaaccccatctctactaaaaatacaaaaattagctaggtgtggtggtatgcacctataatctcagctacccaggaggctgaggcaggagaatcacttgaacctggaggcagaggttgcagtgagccgagacgcaccattacactccagcctgggtgacagagtgagattccatctcaaaaaaaaaaaaaaaaaattatgcctttttgaagcacatacattttataacatacaactgaatcccttattatattattagttttgatttaatgttttcaaaccatctcccctgatatttctgggagatgggaaacatgttttcttacacctcttgcattccattctcaactcccaactgtcttactgcaatgaacacttaataagaaacagtcaattggtcaattgattgggcaacaggctaaacacactcattccttgtctgttcccacttctttctttactttcccttcctgagtaacttatcctaaagtcattaggtgggtggcagccagatggtggccacacattaaggtagaaaagagagtgtcatgatggttccaagtcagagacctagtagggtgaggatcaagtaggtgttcacgtggagaaacagcccggcctgtgtgtgggagtccaagcaagcagagaaaatgtcgacacagaggggtggcctgaaaaagcagccagagcctaaacagggcatggagaacatatttagggcatgaggtgaggagggcatccatgagtgggaagggatgggtgaggtttcactacataaaggggattgatgaaataagtaaataaagtatactggaagccaggtgtgtcacttttgcagaaaagagtcatggattcagaaagggagaaaactagcaggaatcctatgaaattagattaaaatggatgtatccatgtatattcatacccttctagatagataaatggttagataggtgataaaaagataacaagaggacaagataattagatagacataaatgtatgtatgtgtttgtgtgtgtgtacaaaaaaacatatactccctacttctctccactgatagggctaggtaacaatggcatttcaatagcaatgagcacacttagtggccagatcttggcttattaataccattttccactgaaaggaaccagagctttttagagaaatggctgattccagggccaggattaagaatgttcaagataagcctaggatacattttgtgccaggaagcaagaagatgttcaaatgatttccaagtaatgtttggaaatgatatttgaaaatgatttccaaatgatatttccaaatgatttccaaatgatatatggaaacacttaaagactccactaaagaactattagatctgataaacaaattcagtaatgttgctggatacaaaatcaacatacaaaaaccagtagcatttctgcatgccaacagtgaacaatctggcaaaaataaaaaatgtaatcccatttacaataaccccaaataaaactaaatacctgggaattaacttaagagaaagatgtctacaattaatattgtaaaacactgatgaaggaaattgaagaagacacaaaaaagaaggatattccatgtttatatattgtaagcattaatattgttaaaaatgtccatactacccaaagcaatgcacagattcaatgcagtctctcaaaataccaatggcattcttcaaagaaatagaaaaaaaaaaaccctaaaatttgtatggaaccacaaaagacccagaatagcgaaagctaccttcagcaaaaagaacaaaactggaggaatcatattacctgacttcaaattatactacagaggtataataaccaaaacagtatggtacttgtataaaaacagacacagaccaatgaaatagaatagagaacccagaaacaattccacacacctacggtgaactcattttcaacaatgttgtcaagaacatacactgggggaaaagacagtctcttctggtgctgggaaagctggattttaacatgcagaataatgaaactagaaccctgtatctcaccagacacaaaaatcaaatcaaggtggacgaaagactgaaacctggctgagtgccgtggctcatgcctgtaatcccagcattttgagaggccgaggcgggtgtatcacttgaggtcaggagttcaagaccagcctggccaacatggtgaaaccacatgtctaccaaaaaatacaagagttagctggacatgctggtgcgtgcctgtagtcccagctacacagaaggctgaggtggcagaatcacttggacccaggaggcggaggtggcagtgagctgagatcatgacaatgcaccccagcctgggcaagagagtgagactctgtcagaaaaacaaaaaacaaaaaaacaaaaaacaaaactgaaatctgagacctcaaacgatgaaactgctacaagaaaacattgtggaaactcttcaggatattggtctgggcaaaactttctgaagaactaccccacaagcacaggcaaccaaagcaaaaatggacaaatggatcagatcaagttaaaaagcttctgtaccacaaagaaagcaatcaacaaagtgaagacacaaaccacagaatgggagaaaatattttcaaagtcacactctgacaacagattaatagccagaatacatgaagcgctcaaacaactctgtaaggaaaaatctaataatccaatcaaaaaatgggcaaaatttgaatagacatttttcaaaagaagacatacaaatgccacataggcatatgataaggtgctcaacatcactggtcattagagaaatgcaaatcaaaaccacaatgagatatcatcttaccccagctaaaatggtttttatccaaaagacaggcaacaacaaatgccagcgagaatgtggagaaaagggaacccttgtacactgttggtgtaaattagtgcaaccactatagagaacaatttggaggttcctcaaaacattaaaattaacattaaatagagctaccacaatatccagaaatccccatgctgggtatatacctggaagaaaggaaatcatatattgaagagataacatcactccaatattcacaatagccactattcacaaatgccaagatttggaagcaacctaagtgtccatcaacagatgaatggataaagaaagtactccaattatacacaatggagcacaattcagccatgaaaaaagcatgagatcctgttatctgtaataatatggatggaactggaggtcatcatgttaagtgaaataagccaggcacagaaacacagatattgcaagttctcacatacttgtgggatctacaaatcaaaacaactgagctaatgtctgggccttagtcagtgttgtacccaagtactgggagcacagcttttaaaatacatcatgaatgctttaatacaggaatgaatagatgagaggcacaaactggttgggtgttcttctgatacacagtatcttccttgacagattcagtacaactctcaacaggtaagtctcttcatgttatgttaccttatgaggaattaagtggcagaacatgatttctattattttcctttgcagaacaagaccaactttattagttgggacacagtgtggctgcatttgagtcccaagcaaccattagtctattgctatcaccacagagtcagaggggatgagacgcccagcaatctcacccaagacaactccaccaacattcctggttacccaccatgtgtacagtaccctgctaggaaccagggtcatgaaagtaaataataccagactgtgcccttgaggagctcacctctgctaagggaaacaggcatagaaacttacaatggtggtagagagaaaagaggacaataggactgtgtgagggggataggaggcacccagaggaggaaatggttacatttgtgtgaggaggttggtaaggaaaaattttagcagaaggggtctgtctggctgggcttggaaggatacgtaggagtcatctagagggcacaggtacactccaggcagagggaatttcgtgggtaaagatgtgtaggtgtggcttgtgaggatggatttcaattattctagaatgaaggcagccatggaggggcaggtgagaggagggttaatagatttcatgccaatggctccacttgagtttctgataagaacccagaacccttggactccccgataacactgattaagcttttcatgattcctcatagaacatgaactcaaaagaggtcagcaaaggggtgtgtgcgattctttgctattggctgcagctatagccctgcctccttctccagcacataaatctttcagcagcttggctgaagactgctgtgcagggcagggaagctccaggcaaacagcccagcaaacagcagcactcagctaaaaggaagactcacagaacacagttgaagaaggaaagtggcgatggacctcatcccaaatttggcggtggaaacctggcttctcctggctgtcagcctggtgctcctctatctgtgagtaactgtccaaactcctctctttgtttccttggacttggggtgctaatcgggccccttttcccttatctgttttgaagatcaaaagagatgttcaaggagaagtagctgaagtgttggacgctacaaacgcatagaagttattattatcttatgcagatctatgaatgaataaataagcatttctcccatccaccttctaattttggtgactaggagggtttagggacagcatttggtagtgggaatgatttgattagcttagatctgacgaagactaatcaatgaaaacatggcagcggcagattacaaactgctgatcatgatggacagtgtgatcctcatccccttcccaggctctggggattctgggtacaggaaggagtggcttgcatttttgtctcattaattcgctttctgggttctgtgtctgctggaagggatgtgtagctgtattgcccctgtagacctggttcctgctcccccgccttccaacccaggatatcatttacataacgcaccaggggacaccaagacttcatgggaagctgtcccctggctcttccctctttcctgtgccatgcccctgaaaatcccctccctcctatgagtcactcctccaccctgtcatacacaggatggtttatcttgcaatgattaacctctagagcaaaggagacctggaggaagtttcgaggatttattctttgctttaatctttttcctcccgtctctgggaggctaggattaatatagagctttgtttctcacctaatgggaatctactagcagcctgaaaaggcaggagccatgaaagccaatttggattttacatatttttcccctttatgttacagtacaggagggcaaaccctctcactggtgggattcctggcatcctagagcaggtggagagaagagttactttccactgtgggtagtggaggctccacctgtcccattaacttctacctcaatttgacttttattaagagcagggaaccacaatgacatgaaaatagacactataaacctcattttaattctttcacagaaagcttaggaattcagtgagttgtggcaacatggtttccattgtctaacatttttaaatgaattgatatggtttaaattcattcatttttaaaccagaattttttggagatagactatttccagcatgttccttctggatggtaaaacagggctgttagttcagtatttgtgacaataagtgtgtgtaaaataatgtcacctttcctgaatgtcaggaatatgagtctaatgcacaaatgtatacctctaagacaagactgcacgtcttttcaaatatacctgtccggccatttattttaataactccttttcgaatatacctgcttagcagattgtcttaaactctcaggacaggggagtaagcaagactgtgagccagtgacgatagcaaaggcttccaggtaggatccatatgaagtgagaaaatattcctcagctctcagggtagaactccaaagagatattcatgggtcctggccccaccgtggaggtcactcaaagggcaaacaggttggcatctcatctgcttcaagcctggacacaggggcaccatctgtgtcactctgtgtgtggtctgccatgttgtgggccggtcactacagactcgggcagccaggcagacaatgccttagccttagacaatgctggtgcagcccaggagtcagaaaatgcagtgtagaccaggccctccttaggccaacacaattacatgcaatagatgactggcttttctgttagtctcttcactggacccaaaggctgcattactctaccagaggggagctggaaagaaactaaagagttcgcccagcacagcatctgccttgacatggtaccatgtgaatctagacactcaccaagatctttccttgggggccaatgctgctgacacattaactcaatagcttgtcctcacctgagaggtcaggtaatgtgtttaaagttcaggagcagagattagtgtcattgatttgacatggctgtgacaacaaaggagggaactgaagtgggaatacccaaggccaccctggctttggcaggtggtgcacgcacttccactaactgttctggggcagggaaccaaatgtatgactgggcctgctcatgctgcccctgctgagtcctccaaaccctgcccttcatgtaatttctcagttttattttatcacattttataagtcactggatgtttacaaaatgtttggaacctatactgccttgaaggctaacctctaaagaggagtaaacaaggtcttaatacaactctccgggacgttttatcattacttatcttatatgccatactgcaccatttgctatcaacaggaaagtacctggactttggaaggtccctctgtgtcttttagctgaaagtacatatgaggcatgtggattcttttatgcacatcatctttttcagccacatttttgtagtttgcctctctggagccaactgtgtggggctagcagcttcacagctgaatcagtgtctggcaacctcttccttcagcctctcttcttcctccagttttccatccctcagtcacaccggagggggaaggtctgcaaggatccagaaccatcagttggaggagtttgcacatgactcatgaaagatgagttccaggcaggcctgccatagtgaacaccaggcttaatgggtttttcctcagagatacttcacgtacagaggcagtgaactgactgctttctggttgaccaccttgaaaaagatgagtgtgcctggcactgtgcttctcaggtgagtatgacctgagaagtattagttgctggttcttctgcacacaatcattcaaggacatatggatcaaccatcctcctcaacagctcaaatcaaccagatcatctgaccacagagactgaggtgtacctgaaagctgcccacatttctataaggccaatagaagccatgaacacagttgtcaatctgtagaaataaggactccatgactcctccaaggcctctctgtgaatgaacgtttaagaagggctagatcctaaaacagggtcagagcttagagggaagaaaaagcataaacatttctgagcaaattgtaagggcagtgtcaccataggctcccagtgaccctctgtgattgagtgcatacagtgatgcaaaatctcatcatcagtgcaaaagacaaaaaaaatcttactctttctacctaggatgagagtccccaaatcagcgaagagtccacttactaaacagacataaggaaatgaagtgtcctggaagaattcctgcctgaacctctcaggagcatttgaggacatttatcaagtattcactccaggattgggactatgaagacttcagctgctttcagctaatcattgagacttttcaggggtctcagaatagtcaggaaaggacctgatgagtgaatgcaattactgatgttggagttgctgttattatttatcgtgtacatattacctccctctcttgaccattccagttcctgagtaactcaccagccctctgatctataaagtcacaatccctgtgacctgatttctgtttcactttgtagatatgggacccgtacacatggactttttaagagactgggaattccagggcccacacctctgcctttgttgggaaatgttttgtcctatcgtcaggtgagttgcttgagcttcctcttttgcttcttatggttgcaaacatcagcttagttccatcagtaaaaatgcccctccttgggagggagttctgaggtttcacattttcagaaatggtgggactgggtgcagtggatcatgcctgtaatctcagcctctgtgaggccaagactggcaaattgcttgagcccaggagtttgagaacagcctgggcaacacagtgagacacctgtctctagaaagaaaaaattacctgtgcatgatatggtagcccatgcctgtagtcccagctactctgaatgttaaggtgggaggattgtatgaacccaggaagtcaaggctgtattgagctgtgatcgcaccactgcactccagcttggtcaacagaacaagacagaaaggaagaaagaaagagagagagagaaagaaagagagaggaaggagaggggaggggaggggagaggagtggggaggagaggagaggagaggagagaaaaggagaggagagaggagaggagaggaaaaggtgtgtaggctccacccaaagcatggccaggtttacccctggagggaaagtcacaagctcatgtccagaaggccagtagcagcaagctgctctccagcccagatttcctatcctgtgtacctggagcttgtttctcagattctaactctcacaactgaagcctctgttgtctgattactatctgagaattctacacaattttaccctcgataaaagcagtaatttcttcttcatctttcccagatcaactcttgtagtagatcaacatttctgggaccttcttttgcatggttaaaacatcacagctgaatcttagcaacaggaaggtttgtttttatgtttcagaagtgaaagctcagagcacgcattgtaatttgctgggtgtgatgtgtagaggtggcatttctccatcttttctgtgttaagctagaaaactggaaaggaagtctactttctcattcactcactcactttctcactcaacaacatgccttagacttatctaaatctgcaagactaaaagaggttcctggtttctttaactttctaattctgctagagttctagagagagcacatgagataaatgaaaaggatactgatggaggagattaaaaaattgtgcattccctgcagacactcacttttcctcacctcagtttcacccctgcccttgcaggtgatcattcacggggttaggagactttagagagaataaaagaaaaagcaaaaatacatcagaaagacaaggaattacttactggtcatagacaagggtgagtccttcagtacttagagaaaattcaagagtgactttaaattccccacttcaaatatattctctgttttcttgtctttcccttaagacatctctgaatagcttccttcaactgccagtgaaagatagcaggcctgatttcattggacgcaactgttttcagccccaattagaggtagggtttattctatttaaaataataatcaacttgtattttgtttcctctcccagggtctctggaaatttgacacagagtgctataaaaagtatggaaaaatgtgggggtgagtattctgaaaacctccattggatagacctgctactgtgaggaggttaccccactgcaggatagtctctgcccaggtcttcatgggatgaagctcttgtcaacctaaatacaaacagagagaggttctctgaaagaagaggataattacttgggagtagaatattgcaatgggaatctgcttgccgttataaactatgtgcaaattcagggaggtaaacaagacaaagatgctccatagaaaatatgagaagaatctcataactgttttgagataattattgttagctacaaagatcaataacaagggtgatgccacaccaaggttggacaggcagttgctggacaggtgtccttgcagaaatatttttgtgtaaagttgaaatagcctttgtgcaaagttgtggtttttgtagacacttttgtaatagttttgtttccaggaacacaagcataagaatcctctcttcatagccttcttgggatttatttgtcagggttaaaaaacaattagtgacatcactttggttctgataaagttcacactcgctattgtaaaacttttcgaggcttgtcctaccaaggatcccatgtgtcaccaggtatcgaggtcttcagtctgaactaggctaggagcattgtggttaccacttttctgcaggttttggtggcccagggactcccagcatcgccttctgtccagtgtctgcctattcccctcttctttttttcttccttaggtgcccttttatcacatgcattgtctcagacccttctaatatgtgctcataaatgcatggcatcatctccttcccacattgattcactttcaattaaaagccaaaactccttcatttagactgaatttaacatgtgcttttgaaagaagggttgagagataatagagaaacagattgggaaaccacttatgctccacttttttaaactttctctgcaagtatggaattttttgttctgctttgttgtttaaatttaagccaaaacttcttaatagaaggatatacaaatatttattggtttataccattgcacttactttgaagaagagatgctgaatattattaaaccattgtgttccctggtgggctgatggactgtgattttataaggtggtctcagccaattgcagcagctgttccctgtcagaggggctagaggtttggtgagagcagtggatgaggtgcagtggtgtgtttgttcactagaagcaagtgggagaaagctttgcctctttgtacttcttcatcttctcccctcaagtcctcagaatccacagcgctgactgtggagtgctgtggagctggcatggcccatacaggcaacatgacttagtagacagatgacacagctctagatgtccatgggccccacaccaactgcccttgcagcatttagtccttgtgagcacttgatgatttacctgccttcaatttttcactgacctaatattctttttgataatgaagtattttaaacatataaaacattatggagagtggcataggagatacccacgtatgtaccacccagcttaacgaatgctctactgtcatttctaaccataatctctttaaagagctcttttgtctttcagtatctcttccctgtttggaccacattacccttcatcatatgaagccttgggtggctcctgtgtgagactcttgctgtgtgtcacaccctaatgaactagaacctaaggttgctgtgtgtcgtacaactaggggtatggattacataacataatgatcaaagtctggcttcctgggtgtggctccagctgcagaatcgggctagtgaagtttaatcagctccgttgtccccacacagaacgtatgaaggtcaactccctgtgctggccatcacagatcccgacgtgatcagaacagtgctagtgaaagaatgttattctgtcttcacaaatcgaagggtaagcatccattttttgaaatttaaataatgattgatccactgattaaatttttattttgaaaaaaacatatattcacagaaggttacctaaaaaatgtacaggaaggttccatgtactcttcatcctgtcccgcccagtggtaacatcttgcaatcttgtatattgcaatatatatctagtatattcatattatcaggttggcacaaaagttaaaatggcaaactacaggctgggcataatggctcatgcctgtaatcccagcactttgggaggccgaggcaggtggatcacgaggtcaggagttcgagatcagcctgaccaacatggtgaaaccccatctctactaaaaatacaaaaattagctgcgtgtggtggcatgcgcctgtagtcccagctactcagtagtctgagacaggagaatcgcttgaacctgggaggcggaggttgcagtgagccgagatcacgccattatactccagtctgggcaacccaatgagactccatctcaaacaacaacaacaacaacaacaacaaaaaccggcaaactgcaataacttttgcaccaacctaatactatagtacaggaaattgactttgatatagtttacagagcttttcagatttcaccagttttacatgcccttgtttgtgtgtgtttatgtgtgtgggtagttctaagcaatttttcacattcgtagatttgtgcaacgaccagcaccatcaagatgcagacccattccgtcaccatgtggctccctcctgctgtcctacagtcacaacatggagtttgtctttttctctgacaggttctatatcagagcaaacttttatttatttgaggaggccaatgtattaatatttccttttatggattgttcttttggtgttaagtctgaaaatcctttgcttagccctccttcctacattgctttttctaagagttatatagtttaacactttacaaaatgtaactctattacccattttgtgttaatatttgcataagttatgagatttagatcaaggttcattttctgtggactatggctgtccaaatgttccaacaccattttggaaaggtaggcatattgtcaaaactcagctgagtatattttgtgaatctatttcttattgtttactcctccactaataccacactgtggtgactctagtagctgtacagtaactcttaacatcatatagggcaattctttccactttattgatttatattttcagaatggctttagcttttcttgtcccttgcctttccataaaaattcagaat

SEQ ID NO: 803 - DNA, 1959 bp, Homo sapiens
gggcacgagggaggacagagagcaagtcactcccggctgcctttttcacctctgacagagcccagacaccatgaacgcaagtgaattccgaaggagagggaaggagatggtggattacgtggccaactacatggaaggcattgagggacgccaggtctaccctgacgtggagcccgggtacctgcggccgctgatccctgccgctgcccctcaggagccagacacgtttgaggacatcatcaacgacgttgagaagataatcatgcctggggtgacgcactggcacagcccctacttcttcgcctacttccccactgccagctcgtacccggccatgcttgcggacatgctgtgcggggccattggctgcatcggcttctcctgggcggcaagcccagcatgcacagagctggagactgtgatgatggactggctcgggaagatgctggaactaccaaaggcatttttgaatgagaaagctggagaagggggaggagtgatccagggaagtgccagtgaagccaccctggtggccctgctggccgctcggaccaaagtgatccatcggctgcaggcagcgtccccagagctcacacaggccgctatcatggagaagctggtggcttactcatccgatcaggcacactcctcagtggaaagagctgggttaattggtggagtgaaattaaaagccatcccctcagatggcaacttcgccatgcgtgcgtctgccctgcaggaagccctggagagagacaaagcggctggcctgattcctttctttatggttgccaccctggggaccacaacatgctgctcctttgacaatctcttagaagtcggtcctatctgcaacaaggaagacatatggctgcacgttgatgcagcctacgcaggcagtgcattcatctgccctgagttccggcaccttctgaatggagtggagtttgcagattcattcaactttaatccccacaaatggctattggtgaattttgactgttctgccatgtgggtgaaaaagagaacagacttaacgggagcctttagactggaccccacttacctgaagcacagccatcaggattcagggcttatcactgactaccggcattggcagataccactgggcagaagatttcgctctttgaaaatgtggtttgtatttaggatgtatggagtcaaaggactgcaggcttatatccgcaagcatgtccagctgtcccatgagtttgagtcactggtgcgccaggatccccgctttgaaatctgtgtggaagtcattctggggcttgtctgctttcggctaaagggttccaacaaagtgaatgaagctcttctgcaaagaataaacagtgccaaaaaaatccacttggttccatgtcacctcagggacaagtttgtcctgcgctttgccatctgttctcgcacggtggaatctgcccatgtgcagcgggcctgggaacacatcaaagagctggcggccgacgtgctgcgagcagagagggagtaggagtgaagccagctgcaggaatcaaaaattgaagagagatatatctgaaaactggaataagaagcaaataaatatcatcctgccttcatggaactcagctgtctgtggcttcccatgtctttctccaaagttatccagagggttgtgattttgtctgcttagtatctcatcaacaaagaaatattatttgctaattaaaaagttaatcttcatggccatagcttttattcattagctgtgatttttgttgattaaaacattatagattttcatgttcttgcagtcatcagaagtggtaggaaagcctcactgatatattttccagggcaatcaatgttcacgcaacttgaaattatatctgtggtcttcaaattgtcttttgtcatgtggctaaatgcctaataaacaattcaagtgaaatactaaaaaaaaaaaaaaaaaaaaaa

SEQ ID NO: 804 - DNA, 4177 bp, Homo sapiens
gttccagtgcgcgggtctgtggagagccgggtgcgagcggcggcagcacgaggggaaaagagctgagcggagaccaaagtcagccgggagacagtgggtctgtgagagaccgaatagaggggctggggccacgagcgccattgacaagcaatggggaagaaacagaaaaacaagagcgaagacagcaccaaggatgacattgatcttgatgccttggctgcagaaatagaaggagctggtgctgccaaagaacaggagcctcaaaagtcaaaagggaaaaagaaaaaagagaaaaaaaagcaggactttgatgaagatgatatcctgaaagaactggaaggattgtctttggaagctcaaggcatcaaagctgacagagaaactgttgcagtgaagccaacagaaaacaatgaagaggaattcacctcaaaagataaaaaaaagaaaggacagaagggcaaaaaacagagttttgatgataatgatagcgaagaattggaagataaagattcaaaatcaaaaaagactgcaaaaccgaaagtggaaatgtactctgggagtgatgatgatgatgattttaacaaacttcctaaaaaagctaaagggaaagctcaaaaatcaaataagaagtgggatgggtcagaggaggatgaggataacagtaaaaaaattaaagagcgttcaagaataaattcttctggtgaaagtggtgatgaatcagatgaatttttgcaatctagaaaaggacagaaaaaaaatcagaaaaacaagccaggtcctaacatagaaagtgggaatgaagatgatgacgcctccttcaaaattaagacagtggcccaaaagaaggcagaaaagaaggagcgcgagagaaaaaagcgagatgaagaaaaagcgaaactgcggaagctgaaagaaaaagaagagttagaaacaggtaaaaaggatcagagtaaacaaaaggaatctcaaaggaaatttgaagaagaaactgtaaaatccaaagtgactgttgatactggagtaattcctgcctctgaagagaaagcagagactcccacagctgcagaagatgacaatgaaggagacaaaaagaagaaagataagaagaaaaagaaaggagaaaaggaagaaaaagagaaagagaagaaaaaaggacctagcaaagccactgttaaagctatgcaagaagctctggctaagcttaaagaggaagaagaaagacagaagagagaagaggaagaacgtataaaacggcttgaagaattagaagccaagcgtaaagaagaggaacgattggaacaagaaaaaagagaaaggaaaaagcaaaaagaaaaagaaagaaaagaacgcttgaaaaaagaagggaaacttttaactaaatcccagagagaagccagagccagagccgaagctactcttaaactgctacaagctcagggtgttgaagtgccatcaaaagactctttgccaaagaagaggccaatttatgaagataaaaagaggaaaaaaataccacagcagctagaaagtaaagaagtgtctgaatcaatggaattatgtgctgctgtagaagttatggaacaaggagtaccagaaaaggaagagacaccacctcctgttgaaccagaagaagaagaagatactgaggatgctggattggatgattgggaagctatggccagtgatgaggagacagaaaaagtagaaggaaacaaagttcatatagaagtaaaagaaaaccctgaagaggaggaggaggaggaagaagaggaagaagaagatgaagaaagtgaagaagaggaggaagaggagggagaaagtgaaggcagtgaaggtgatgaggaagatgaaaaggtgtcagatgagaaggattcagggaagacattagataaaaagccaagtaaagaaatgagctcagattctgaatatgactctgatgatgatcggactaaagaagaaagggcttatgacaaagcaaaacggaggattgagaaacggcgacttgaacatagtaaaaatgtaaacaccgaaaagctaagagcccctattatctgcgtacttgggcatgtggacacagggaagacaaaaattctagataagctccgtcacacacatgtacaagatggtgaagcaggtggtatcacacaacaaattggggccaccaatgttcctcttgaagctattaatgaacagactaagatgattaaaaattttgatagagagaatgtacggattccaggaatgctaattattgatactcctgggcatgaatctttcagtaatctgagaaatagaggaagctctctttgtgacattgccattttagttgttgatattatgcatggtttggagccccagacaattgagtctatcaaccttctcaaatctaaaaaatgtcccttcattgttgcactcaataagattgataggttatatgattggaaaaagagtcctgactctgatgtggctgctactttaaagaagcagaaaaagaatacaaaagatgaatttgaggagcgagcaaaggctattattgtagaatttgcacagcagggtttgaatgctgctttgttttatgagaataaagatccccgcacttttgtgtctttggtacctacctctgcacatactggtgatggcatgggaagtctgatctaccttcttgtagagttaactcagaccatgttgagcaagagacttgcacactgtgaagagctgagagcacaggtgatggaggttaaagctctcccggggatgggcaccactatagatgtcatcttgatcaatgggcgtttgaaggaaggagatacaatcattgttcctggagtagaagggcccattgtaactcagattcgaggcctcctgttacctcctcctatgaaggaattacgagtgaagaaccagtatgaaaagcataaagaagtagaagcagctcagggggtaaagattcttggaaaagacctggagaaaacattggctggtttacccctccttgtggcttataaagaagatgaaatccctgttcttaaagatgaattgatccatgagttaaagcagacactaaatgctatcaaattagaagaaaaaggagtctatgtccaggcatctacactgggttctttggaagctctactggaatttctgaaaacatcagaagtgccctatgcaggaattaacattggcccagtgcataaaaaagatgttatgaaggcttcagtgatgttggaacatgaccctcagtatgcagtaattttggccttcgatgtgagaattgaacgagatgcacaagaaatggctgatagtttaggagttagaatttttagtgcagaaattatttatcatttatttgatgcctttacaaaatatagacaagactacaagaaacagaaacaagaagaatttaagcacatagcagtatttccctgcaagataaaaatcctccctcagtacatttttaattctcgagatccgatagtgatgggggtgacggtggaagcaggtcaggtgaaacaggggacacccatgtgtgtcccaagcaaaaattttgttgacatcggaatagtaacaagtattgaaataaaccataaacaagtggatgttgcaaaaaaaggacaagaagtttgtgtaaaaatagaacctatccctggtgagtcacccaaaatgtttggaagacattttgaagctacagatattcttgttagtaagatcagccggcagtccattgatgcactcaaagactggttcagagatgaaatgcagaagagtgactggcagcttattgtggagctgaagaaagtatttgaaatcatctaattttttcacatggagcaggaactggagtaaatgcaatactgtgttgtaatatcccaacaaaaatcagacaaaaaatggaacagacgtatttggacactgatggacttaagtatggaaggaagaaaaataggtgtataaaatgttttccatgagaaaccaagaaacttacactggtttgacagtggtcagttacatgtccccacagttccaatgtgcctgttcactcacctctcccttccccaacccttctctacttggctgctgttttaaagtttgcccttccccaaatttggatttttattacagatctaaagctctttcgattttatactgattaaatcagtactgcagtatttgattaacc

SEQ ID NO: 805 - DNA, 33795 bp, Homo sapiens
gaattcatgcttcatttttaattctttttaaaacagaaaaagtggctgggcaagatggcacacacctgtaatcccagcattttgggaagctgaggtgggtggatcacttgagcccaggagttctgagaccagcctgggcaacaaagtgagacctcgtctctataaagaataaattagctgggagtggtggagcacacctgtaatcccagcactttaggaagctgaggcaggaggatctcttgagcccaagagttcaagaccaccctgggcaacatagcgagaccctgtctcaaataatttttaaaaagaaaaactacctcttcttaagatggttgtagtatgggagatggtgtgtttaagtcttcccaccccagtgtcacagctcagggcttctctagccttcctcacagcggttgggggtgcccagacacatcctgaagtctaggccgtgttctgagtgtctctgccacgggcccgcctggctggctttagtccaggagcagcctggactgtgactcttgaaggctgtgggaggctggtgaccgggagcaggaggtctcagtgcatccctgaagggtcagagagccatgccgtgagaggccaggagcaggcagccattggccctccagccctcaccaaaggccaccacctcagcttgtcctctggcaactcagcctgggaatttgctttccctgtggaacgagagacactggccgcattgaggggtgactttccggtcctacaaaattgtagccctctttctgctagaactggtgagacttggctaatttcggagagactttaggaaagtaagagaaatacattaggtcccagtgccaagccccaaggccatctttccaggtatgggtatatcctgcagtgataagagaagactgactcttaccagctctttgggggaaatgaatatactttcccacgttccagtttttctggctgtggcaggacctgtttgctgccaagttgttcctgtggggaaacagcagtgggcccagcaaatgtagccaccaggtcggggcacagccaccaggtggaagaagcaaccctgccctcttccggttccatgtgtgcctcactgagagcaggacttccagaccctaccaggaagcgctgctatccgggtcatagtgataccctgtcaggacatcgttgtttttgtcttgtttttttttgagacagggtctggctctgttgtccaggctggagtgcagtggcgccatctcagctgtctgcaaactccgccccaccaggctcaagccatcctcagcctcccaagtagctgggattacaggcgtgcaccaccatgcccagctaattttctttttttttttttttttttttgtagagacaaggtttcactgtgttgcccaggctggtcttgaactcctgggctcaagcgatccacctgcctcagcctcccaaagtactgggattacaggcgtgagccacggcacccggtcgagatggaacatcttaatttcagagttgccttcaggactgttgattgaaccccataaatatttttagtcttttgggacttttaaactcctttttgaaacctaagcattgccacaaacaaactaaccttcaccacgaccaaacaacccagaactcggaccctggtcctcgggctgccctacaggaagcacccctagtcctcttgctgctctgctagatgagacagcaggctcaggttcctccatgaggcccggctttcagtgctctcctgttacacactgcaaggaagcttccagatcgtggagcacattgttgaggaaaagacaccttggggagaagggggaggtgcagagtgtggttaatggtgggaaggaactccggtaagtgtgttatatgatctgctcctattatcccctgaataggagcctctctccactcaagagagaatgccaaggactggcccggcatggtggctcatgcctgtaatcccggcactttggagccaaagcagcggatcgcttaacaggagtttgagaccagcctggccaacatggcgaaacccctttcctactaaaaatacaaaaatcagccgggcatggtggtggcaggtgcctgtaatcccaagctactcaggaggctgaggcatgagaattgcttgaatctgggaggtcgaggctgcagtgagctgagattgcaccattgcactccagcctgggcaataaagcaaggctctgtctttaaaattaaaagaaaaaacaagttattctaactttttttaattttaaaagattaaaaaaagagaatgtcaaggactgaaattgcatagagggcaatgctttttctttataggtggtgaactgggttctgcttgagttttttctctggtaatttagaaccaatggaagcaacttcaacagctctaattttaattggcagaatgtgagatggaatgggacctcaaatgaaactccaggccaagagctcatgagccctgcagcatgtggggcatctctcggtcttcttgagttctgtaacttaaagtttgtgtggcctttaaagagtgtggaagtagccgtcccctctccgaaggtgcacaggatttggccagcccacccgcgtggccttccccttcccctctccagaccctccacagcagatggggccacggaggcctggagaagtggagtcactgacctgaggctacatggctggcaggcagcagggccaggcagcaaagcaggcagtgagggcctaactgcccgcgggctggctcggggctccctcaaccacattggcatcccagtgccaatcccaaattgttttctttctatctctccagacatgtagatagcatggaggtggagggaattccctcccacacagagggcgatatgccccagaacagcactcctgcccccaagaaggctgtctcctgacactttttactgctcttttactctcccccagctttttttttcctgcttgtaaactgcatttttcctttcccttggtttctggctctaagctgttttcccagggcttggctccggcgcttgcacagagataaacacggccattggcctggtgcacaatcccagcttgcctgcatccggcctcttccatcctgagtctccaggggtccctggggttcagggacaatggctgagggagaagctgggagttccccccagggtttgcctccgtcactcttgggccagccaagggagtggggctgggagcttcaggatggcttttgggaagcccctgggagccccaaggcttgggtagctgctgacagggagttcacagcaggaacgctcccaggctcccatcctgcgtccgcttggcaggcaggccaggaatgggagggaagccatccgtttttccctttccactggatgttcccttcgccttccccagggagagagtgatgagactggggtgctggggagaggcagtatgggggcaggcttgggaccaggcctgcagaagcagcagaccctccaagcccacctacctctctggcctggcatctgaggggcaggtcatgccatagtttttcccttaccctctctgcccccacactttcctccccaaagtggcagacttcccccaggagaagcactggcttttcacgctgctgtgagtctcagtcactattagagaaacacagtcagagccaggcctgcccaactgtcgcagggctgggtccacctcatggcctttgttctggaaaaatacttgggcattctgccctgcaatgcacttagccaaggccgggcacatggcaagtgctgagtcatggccggctagcactttactgcgattttaggagcactttcttgtggtgaggttctgactgcttgcttgggttgggggaggggagtctttgggcaggcggtagacctgccctttactttgtgtggccggatctgagtctgaccccatctttttagaccccaaaacccctgatatttgtagtgcgcctaggatactggttctcccagtcttctttggggtcagggggcgttatagtgctctcatgccacctactcagcctctcttcctgcatcttatggtctgtctctaccaactaggctaagtaggttatatttattattcctcaagggaattctggtggctaagccttcacctttccaaggagagctatatttatctcttccctgtggtcagctcctgctgatgtagcaaacattagaacttcttcaaaacatcaaagtttaggagacaccatgaaaaactgagaagtaaaacaatacaaaatgagagtgcctgctttattttgctagcacctgaaatcagagcttcattgatctgcctcaaaagttccagagatatattttatctgattcgagtttttgttttgtaatgcacttttccagaatactgacaagttactgggctgagagtttgtgcaggagggggttggaggggaagcctttcagaatgaaatcatttttttctcgaagccaggtactcttcccaacaaaatggttccttgcctagtaaagaaaatacaatttttgttgcaaaccagcatgattttttttaaaaacgtgactggaagatagtggtcatttagctacaagatactgagctcagaggggaacttgatgaacatttggctcctactgtaagaaatgggattgcatacattttaattccaattctacactgaagtcaaattttgggcatgcatttgtgaaaggtggaagaaaatctcactaagttcaaggtgaagaagttagatgagcaatcaatggtctttacccttcaaagatggactaaatgtaaactgttagaaaacaacaaatgatacaagtagagtacttgttagtttacttgtgtttatctttctggatctgaggtataaaggaccattttaaatcaggagagcaaataaagtaggtgctttgttctttggcacagttaaaaggtaaatcacctgtaatcccagcactttgggaggccaacgcaggtagattcttgagcccaggagtttgagaccagcctgggcaacatggcaaaccccatcttcacaaataataaaaaaaattagccaggcatggtggtgcatgcctgaggacccagctactcgggaggctgaagtgggaagattgcttgagcccaggtggttgaggctgcagtgagctatgatcactgcactccagcctgagaggaagaacctgtctcaaaaaaaaaaaaaaaaaaaaaaagaaccaaaaaatgaaaaacaggctgggtatggtggctcacacctgtaatcccagcactttgggaggccaaggcgagcagatcactttaggtcaggagttcgtgaccagcctggccaacatggtgaaaccccgtctctactaaaaacacaaaaattagcatgggtgtggtagtgtgcacttgtagtcccagctactcgggaggctgaggcagaagaatcgcttgaacctgggtaggcggaggttgcagtgagccgagattgccccactagactccagcctgggcaacagagcaagactccatctcaaaaaaaaaagaaaaggtagatcagtttaataatttaatggaacttaatatttgttacactggggtaaaaataaaagtttgctttttaaaaattctcttaagtgatgtcactaagtcaagttttaaaacatacaattcattttaagattgatacttaaagttcaaatgaactctttttctgttatttgaatgtggtttttaaagtgccaagaagttatttgttttttaaagtaaataagagatttggattggcgccttggaaaagcaagtataaacatgtttttggaccagaggttggttcagcaacactgagtgtaactactggctgggtactgtgcaggcaccaggactaacacacaaccctgtaactgtaggagctcacactttagcagggcagacaaacggataacagataaacacccttccagttatagacacatactatatgcacacagatggaagaagaagtgtgcacaagcagaagtggttaggttttgccacaaagttttcacagagaaggggtcattgagcagggtttttaagtatgaataggagtttaccaggagaaaaataatggtggaatgggaataatccaggcagaaagaagagcatgtggaatggaatgggatggaagtgaggaagcgcatggcatgaatgaaaaaacacaagagtctcataggctattttcgcataagagttgatgattccacatttccgagtgtagttgtctcatttattactatactatctcttttataaattgctacttcatcacgagctgacccaggagttttaacttagaaatcgtgtttacaattcagattacccttctgtaaattacatgctgaaaagagtgagctaagaaaatatacttggggacaggcgtggtggctcatgcttgtaatcccagcactttggaggccaaggtgggcagatcacctgaggtcaggagttcaagaccagcctggccaacatggtgaaactccgtctctactaaaaatacaaaaattagccgggcatgcctgtaatcccagctactcaggaggctgaggcagggagaattgcttgaacccaggaggcggaggttgcagtgagccaagatcacaccactgcattccagccttggggacacagcaagactctgtctcaaaaaaacaaaaaaaagaaagaaagaaaatatacttgggaatgtgaggattttgtggttgagtgaagaaaggtggcccagacaggagattactcagaactcaaaggttcaccgcagctgtccttgatgagctggtggctgcggcaaatacgccatcagattgggatgttgaggcagactgctagcaatgttctctccttcttccttagcaaaggatttttaattttagttggagaagaccagccaaacacttgacatttcttggccccctggcagctaagtatgacagagtgattaagtgcggacaaagagttataaatgtattagagcagagccacctggggcccagacagtaccttgtgtcaaaattttctccagtgcatctgaaatcgcactgtgatcctgtccccctaaactttgtcttctcttggtgttccctccctcagtaactgacattacccgccctgctactgccatagccaaaaacccaggcaacgtccttgttaaacccctctccttcactccgccacagatatcagaagttctggcagctgaacttccaaagtacatctcaaatccatctccaacccagcccaggttcctgggctctcccctggactactaccctgcccggtccactcacatctgctctaccccttccaacacaatggccactctgaagccacagcaatctttttaaaacattttttttttttttagatggagtctctctctgtccccaggctggagtgcagtggcacgatctcggctcactgcaacctccgccctggttcaagcaagtctcctgcctcagtctcctgagtagcggggactacaggcgcatgccaccatgcccagataatttttgtatttttagcagagatggggtttcaccatattggccaggatggtctcaatctcctgacctcgtgatccgcccacctccgcctcccaaagtgctgggattacaggcgtgagcccaccaatacaaacctttttttttttttttttttttaatggagacaggttctcactatattgcccaggctggtctcaaactcctgggctcaagtgatcctcctgctttagcctcccaaatagctggattacaggcatgagccaggccagagtgatcttttggaaatgcaaatctgatcatgtatatcccatcccctgcgaaacccttaaagagcttcccattgtccttgggttagtgtggccttcaaggcctgtgtgatctcaccactcccctagcccctcagagtgctactggtatcaatattatggagaaacagtttacttgaaagctaagtgagagttttagggctgggatctcacgctgccccccgatctttcagttttgtgctcaccatgctgtcttactgtggggctttatgaaggcgaatccctctgtcgaaaagctattccctccccttcccacctccctaacttctatccacctttcagatttcagactgactgtccctcctctgggtagcctctcctgacctatcccagcaaggcagatctctcagtcctagcctttgtcgagctcacatttgtcagggtgattatgtgactgacagctggacggaagctcctgtaggccactgaccatgtctgctttggctcccatctggactctcagtgcctggcattctagtagaagcttaattatttgttgaatgaatgaatgaatttaaaaattctttgaatgagagcatagaaaattaatcagaacttttgaacaagaagagctgaattctgccccttgatgctgagaatgcaccttctccgaacagatggaaaagaggggtggagattaccccagggacatatcttgcaaaatgctgatacccgaagatgtacatagccttgtgctttggtcatcctcccaaatcatgtccttggtgaaggcacatggagaggagagcagatgctgccagaccacggtgcctgacgccatgcactccctcacgtccagcctgtttatgtgcacacggctgcagcgggaccttggggtgtgggctaaataacaagaacaggggctcctctggggtctgttacaaggcagagatgctccacggtaattagggatttaggggaagaggaaggaacacacatgttgataataagtagttcaacattattatccccattttacagatgcagctactgagcttagagaggtttcataacttgcccagagcccctcaactagtaaacagtggagccgagatttgaacgacccaaagaggaaagcaaacaagcagcccctttattactttttttttttttaagatgagggtcttgctatgttgcccaggctgatattgaattcctggccacaagtgattcaccaccttggccccacgaagtactgggattacagtcatgagctaccacactgggccaaagccctcgtattgtaacctccaagatgttttcatttctaaagtcaaaggttgtcagagttgctgttttgcagggagccatgggatggggagtctccgggaaacccaggctggctccttaaatggcatcacccaagttggccatcaagcttccccagactcagtcactcggccccctctttccctggctgtagagcaggggtttggactcgaggctgctgagttcctctccagcttccatgcccagtggcagtgacttatcaactggcccacccggtggatgtaggggtgatgcagccctgctctgtcctcttgagtgctgggtggccatgagagagggaggccatgagagggaggggagggttctcatctgcttagtgccaccccctccccagcccaccccaggtcctctgccgccttgggttcctgcgtgagcagtccttctcactctgggcgatgttcgctttcaccagcccaaccccaagaagtccaccctggggaggacagagggggtctccacggctccacacccccatgctttgtcggagatctggccaggcagagtggtgccctcttgactgagcctcgagcctttgctttccccttactccaaataaagccgcagccctggcgagggagcccagaggcctgaggacagcctgctgggtgcctggcactctctagatcctccctgcctgggcggtgggcatctgcaattctccctgtctcgaactgcagcagaatgtgtgggcagggttaggcagatagagagtgggtgcctggactcattggtcagactctaagaccgcccaccgcccgccgcccccgcagtccttcccaggactggctgacccaccagataggggagggtgttgtttcttattattacattttttgagaaaagctatgcaggcctgggagacgtctgtgccctaggagtcccttctggcctgaagactcaaggctgcaaacaggtgctgagagggaacaagaaggggagttggggtgcaacacacccagtgacagaccaggagtgagtgctgtggccacagattctaatcctcacaactgcagtgtgatttaggctaagccccttgcctactccgattcttgccttaaataagtgaaaaggaaagtcaagtttgatgagttgtggctctttagtgggtggatttgcatgtaccatggattacatttaccagggtctaggaattgtcaagcgcccagcaggctgccatcaggcctctgagctccttcgccaggcggctttatttggagtaagaggaaagcaaaggtttgaggctcagtcaagagggcgccactctgcctggctagctctccgacaaagcagacgggggggtgtggagccgtggtgaccccctccgtcctccccagggtgggctccttgggcttgggctggtggaagtgaatattgcctgcagcaagaagaaggactgttcatgtgggagcgcaaggcggcagcggggttggaaacccacccccacacagtcaacacctgctgtcacaccaggctaatcaagaacacctttctttggtgcattaaccacctgctattaaataaaaggctgttactaggtggcaaagtaacacactgcagtagagcctatttgtaatctgagatcagtggctgtaaggcaccatccttgagccaagcaagtactaatattcttgttatcttaattagaatgcaagagatcgtgtttttaaaattctctttgaatctgtcactttgccctcctcttcctgggtgatacacctggtagtgctggtgggggccatcataatgccccttgtcccagattcccttcttttagatgggactcgagcactgatcatttcagccctgtatctctcaggtcagcgtggttcagtttgctgtgcagagtccaggggagataaccacgctgtgcacacatgagattggctgacttggcaggactgtgcaattgtcagaaggccgtggggagtgggggccagtgcctgcagcctgccctgcctctctcacaggcccttagagcatcgccaggtgcagagctccacagctctctttcccaaggagtaatcagagggtgagaacgtggagcctggtggacaggtgaaagcactgggatctttctgcccagaaaggggaaagttgcacatttatatcctagagggaagcgacagcagtgcttctccctgtgctgaggtacaggtaaggagggtggtttgtaaagttcactggggagggtgatccctctttattgttctaatattatgctcgcagcctccttgacaacatcatgcaaaatgtgtcttactagtttctagtgcataaaatattggtggagctcttcgctgtgctgggccagtcaccagtgctgggcactgtgggtcaagcatggcccaggacggacagccctgccttcccaagctatggtttattgtggtaggatctgcctgcccagtgaagtgtgttcagctgctcctgttgctgggggaagctctgctctctgccttcggctgcctcccacacgctcccatgtgtctcccagtccctaacccctagtcctgctttcaataccgcaggggcttttagctgacttttctccatcttcttaaagggcaggatttcctggcagagacataacgtctttctggaaatgaaagaagctgatgcatgtttttcttttctgaattacttaaataagaggaactcatttccaggtattccctgccttgtttttattgtgggagtgtggtcccagctgcccatctgatcagctgacatagggtccttggggcccaggcactgttctgcttgggattgaaagatgaaagccacagggccaggcacagcagctcgtgcctctaatctcatcactttggaaagccgaggtgggcggatcgctggaggtcaggggtttgagaccagcctggccaacatggtgaaacgctgtctttactaaaaatacaaaaattgcaggaggtggtggtatgcacctgtaatcacagctactcaggagtctgaggcacgagaatctcttgaacccagggacagaagttgcagtgagccgagatcgcaccactgcactctttgagactctgtctcaaaaaaaaaaaaaaaaaaaaaaagggaaagcaatggcctggcttggctggagatggaacatgcatcaacgtgtcccacgtgtctccagcagggatagcgaaggcctgccccctggcacatagactgagtaaatgttgatcagtgagaccttgaggcactttagagtttcacaatccagagagggagatagattggaagttcaagggtggacacctgggcatgattcccaggacgaaggctgcagtcggttctaagaagtatgctggtgactatgagagaagaggttgtgggtttcctctcttgaaagctgtctccataatcacatgtgggggtgataagggctctggtccaggggagggggcgaggcacacagggggctgaatctgatggcatgaggacttggtgatgggctgtggggaaagaattggagatgactctagggcctgagggtgggaagctgggagttcactgggatcactgatagaaacgcggaggtggggggtgccaagctgattttcctgattagatttcctacagaactgcaggaataaggcgagagccatcgccctgggtggatttctgtttggagctctatcgctggaccactgtggacaagtatttcatagaacgacccccagtagcccaattctaggtttagaggggcagctcttgacaggagcaaactccagggcctctgcaaccccccagcagagtcccaaacatctgacatgtagccaatggaggacatgcaagtggtggggttcccagcagggaccacctcctgccttgggtttccaagacagagcgaggggtgctgctggggcgtggtttgcaggggccttgtcagaactcgatgctttctcctccgtctgggtcctaactgcagtgcatctagagaccctcctctgactcaggcataaggacggcccgatattcatgcaggttactctgaacaagaacagtctgtgggttacttccctaggaatgaggaagatgaagagctagataacaatgctgggctggtatctgcctgatagtgctttgccaagactatggtttcttcctcttctgatcaaaaaagacacaggagtcagacaaatggggattaaaagacaactgagttgatgtgaaatgtaacaggcaacactatggacacagaaagtagattagaggctgcttaggacctaacgtggagggcagtaggggagtgacagctgaagggtatggagtttctccgtgccgatgaaaaatgttctacagttgactgtggctatggctgcacatgtctgtgatatcctagaaaccactggagggttcactttaaatgggcgaattgtatggtatatgaattatgtttcaataaagctcttaccagctaagctgtgtggccatggctgggcttcctagcagtgtcccccaaccccaaattgaacttactctcccagcacttgggcctccccattaccccctgtctgccctgaggataagcctctctccaagaaggacagagcaggggctgtgggccaccattcaggaaaggtgctcctctcccctgggggagggaacccagaggtcatggacagaagccttctcagacatgcaaaaaacatgaggctgtcgggcgccgtggctcacacctgtaatcccagcactttgggaggccgaggcgggcggatcacgaggtcaagagattgagaccatcctggctaacatggtgaaaccccatctctactaaaaatacaaaaattagctgggtgtggtggcacgtgcctgtagtcccagctactcgggaggctgaggcaggagaatggtgggaacctgggaggcaaaggttgcaatgagctgagattgtgccactgcactccagcctggtgacacagtgaaactccatctcaaaaaaaaaaacaacatgaggcctcagaaatgtagctcccaaaaccccctacccagggctgtgcagaagccaaaccaggttcctattttcccaggatgatgaacagttttcaaagcttagtaggattgtgggtgattttgtctcattgtctgttgtttttccatttttctagatcatatatatataatatttatactatatataatatgtatatagtgtgtgtatatatatatataatatgtatatattaggtcaagtgtaaataaaatcagggacagggttggagtcgtcagcaggaaagagcctgctggggatcagagtctctgggctgtcagggctcgggctgggctgggctctcgttgttaatggtcttcccctcatcttgcaggagccatgtggctagaaatcctcctcacttcagtgctgggctttgccatctactggttcatctcccgggacaaagaggaaactttgccacttgaagatgggtggtgggggccaggcacgaggtccgcagccagggaggacgacagcatccgccctttcaaggtggaaacgtcagatgaggagatccacgtaaggcaccttgggccgggccgggctgggcagtggagagggtggtgtgtcgaagacaggggttgggtcttaggccagatgcgggaggggacgggggcttgggaatggtccatcctacttgggagtgtgtttcagtctgcttttcctctgctgggcaggtgcaggttgctttggagagggatgcccagccctcccactttctctcttctcctttccctacccaaggcccagcagtgctcaggcaggagatggggtaacctgtatcaaaggtcacagaaagcagctgtcatcacctcctctatgccctgcctgaagccttgggagtgaggttgtgggagaaagtgagcaggttcccgtcagagacccaggaagcactgagaaggcagggatgctactggttaggcaccggctgtgtgtcagccattcctggtcacattcaatcctacggtgatccgcggggtgaggattgttgttcccaaactgcagatgcagaagctgaagctcaggggcataaagcaactcgttccaaggcggcctagctaacatgcggaaggatttgaagtccaatctaatcctgaagctgctgcccctcctctgcacagggatagagtcaggaaggaggtgactgggcaggtggggtgaactgagaatgcattctcggggaggagcaaggcttgagtgggggacaggacggtagcagcctgcatgccctgccaatcctttctttcattccgtgggttttgagcacctactgtgtgcaggcccagtgagtgcttgggagaagagacagccccttccgtccaacagcatacagtccagtgaatgagaaaaggaatgtgcacaaagaaaagtagactaaaagataaataaagataggctaggtgcggtgcgtcacgcttttaatcccagcactttaggaggctgaggcggtggatcacctgaggtcaggagttcaagaccagcctggccaacatcgtgaaaccccgtctctactaaaaatacaaaaaattagccgggcatagtggcgggcacctataataatcccagctactcgggaggctgaggcaggagaatcccttgaacccaggaggcagaggctgcagtgagccaagatcacaccactgcactccagcctgggcaccaagagtgaaatgccatctcaaaaaaagaaacagatgcataaggataaatgtcacaaaaagcatggataaaagtcatgagagttccaaggaggaagagatttaaaagcagaagctgggctaaacccaagagcaaccaggctgaggctccctgggtaggacttgcttgctgcagccttgctatttagggccaagctgagccctaaggaaagctcctttagggaattagactcctaagggagtctgagatttccaaaatctgtttgggggtaactgaaacacttgggaagaagcctgggaatggtgatgcttgagaggctctctaagctgacatgaacttcctcctctggggctggccttttagcctgatacatgtcaatgagacttgcaccctctctcctggtctgtaaattttttagtttttggagacagggtcttgctctgtcaccaggctgggggtgcagtggtgcgatcttggctcactgcaacctccgcctcctgggttcaagcgattctcctgcctcagcctcccaagtagctggcattacaggcacctgtcaccatgcctggctaatttttgtattttttagtagagatggggtttcgccatgttggccaggctggtctcgaactcctgacttcaagtgatccacctgccttggcctcccaaagcactgggattacaggcgtgaaccaccgtgctgggcctggcctgtaatttttatcccaactcagttataatgtatcattcaatgttgtatatcaggggtcaggaaaccaggcccatagaccaaatgtagcctgctacctgttttagcacagcgcccatgccaagaatagtgtttacctctttaaatagttagggggaaaaaaatcaaaagaagaataatagtttgtgacgtgaaaattatatagcagtcagatttcagtgtccataaatttttattggaacacagccacccccattcatctgtgcattggctatggctgtccataaataaagttttattggaacacagccacccccattcatctgtgcattggctgtggctgctttcacactatgaagacagagtggagtcactgcagcctgcaaagcctagaatatttactatctggccctttacagaaaaagtttgccgactcccgctgtgagaacgcctgggtaaattaaagatgagtatcgtgtatacacttaaagagtaaaagatgagctgggcgcagtggcttacacctgtaatcccaccactttgggaggccaaggcagacagatcacttgaagccaggagttcaagaccagcctggccaacatggcaaaaccccgtctctactaaaaatgcaaaaattagccggacatggtggctcacacctgtaatcccagctactctgggagctgaggcatgactggcttgaacctgggaggtgggggttgcagtgggccgagatcacgccactgccctccagcctggggccagagtccggagaccctatctcaaaaaaaaaaaaaagaaaaaaagaaatgcgaagtctacagtgaagaaggaagaagtgaagaacacatccgctttggagtagccagtgatgtgggaaactgccttgccacttccagagggcagtatcttgtggctgcagggtttgctgtgttttctggaaacagactttgctcttgtgctctgtccttcccatccctctcaacttggggtcctgaattttgctccaggacttacaccagaggatcgataagttccgtttcaccccacctttggaggacagctgcttccactatggcttcaactccaactacctgaagaaagtcatctcctactggcggaatgaatttgactggaagaagcaggtggagattctcaacagacaccctcacttcaagactaagattgaaggtatgtttgcaaaacgccagccagagagggatgtatgtcatgagaacagccttcttccacaatgtgacttacagtcagataaagttggagagattcagaacccaattataggtcactgagatgtacttatacttgtaaccttactaaatgcaaaaatattgcagtcacaacaaatctgtccatctttagagctaggcaggaacacatacatgcaatttaaaaaccaaagaaatgcaccatccagtccaatgatgtggcaatctttgagaggaaggatggagatgagatttagacccaggccaagtgggggtggctcagaactgtaatcccagcactttgggaggctgaggtgggtagatcacgaggtcaagagttcaagcagcctggccaagatggtgaaatcccatctctactagaaatacaaaaaatagccaaggtgtgttggcaggcagctgtaatcccagctactctggaggctgaagcagagaattgcttgaagccaggaggcgaggttgcagtgagccaagatcgcgccactgcactccagcctgggctccatctcaaagaaagaaaagactctgctctcagttcttttggatctatactcagaagtggacttgttggatcatacggtaattctgcgtttaattttctgaggaaccgccatactgcgttccgcaggctagctgcaccattttactttcccacccaacaatgcctcagaatcccgattctccaaatccttgccaatatttttttcctttctttttttcggtaatggtcatcctaatgggtatgaaatggtatcacattgtggttttgagttgcattttcctaatgattactgatgttgagcattttttatgcggtacttattggattctttgtaatttctccgaagaaatgtctgttcatgtcttttgtccattttttgggtgttttattagggtttaggagttctctatatattctgaataaaatctcttatatttgcaaatgttttctcccactctgtgggttgccatacaattaatctttttcagagacaaggtcttgctgtgttgctcaggctggagtgcagcggctattcacaggcgtgatcatggctcaccacagcctcgaactcctgggctcaagcaatcctctcgcctcagacctcctgaatagctggtactataggcgagcaccactgtgcccagcttgttaattttttatattgaagaaattgtacatgttaggaatcttatttttaatgttttaagataatttggccttttcaaggaacagtgaagattttaatttgttaaaattctaggaattacttaaagtatatgaaagacatgttggtcagtcagataaactaaagttcctaaaaaaaggaaattgaaattatagtgttaactgggtgtggtggcatgcacctgtagtcccagctactcaggagactgaggcaggaggattgcttgagcccaggaattcaaggctgcagtgagctacaaggacaccactgcactgggtgacagatcaagaccccatctcttaaaaaaagagagagaggctgggcacggtggcgcacgcctgtaatcccagcactttgggaggctgaggcaggtggatcacgaggtcaggaggttgagaccatcgtagctaacacggtgaaatcctgtctctaataaaaatacaaaaaattagccaggtgtggtggcgggtgcctgtagtcccagctactcgggaggatgaggcaggagaatggcgtgaacccaggagatggagcttgtggtgagctgagatcacaccactgcactccagcctgggcgacagaatgagactctgtctttaaaaaaaaaaaaaaaaaacaggctgggcgccgtggctcacgcctgtaatcccagcactttgggaggtcaaggcgggcagatcacgaggtcaggagatcgagaccatcctggtctaacttggtgaaaccccgtctctactaaaaatacaaaaaattagccgggcgtggtggcaggcgcctgtggtcccagctacttgggaggctgaggcagaagaatgccgtgaacccggaaggcggagcttgcagtgagcccagattgcgccactgcactccagcctgggtgacagggcaagactctgtctcaaaaaaaaaaaaaaagaaaaaaaaaaaaaaagccgggtgcggtggctcacacctgtaatcctagcactgtgggaggccgaggcgggtggatcccaaggtcaagagatcgagaccatcctggccaacatggtgaaaccccgtctctactaaaaatacaaaaattagctgggcgtggtggcacgtgcctgtagttccagctactcgggaggctgaggcaaaagaattgcttgaaccagggaggcggaggttgcagtgagccgagatcgcgccactgcactccagcctggcaacagagcaagactccatctcaaaaaaaaagggagaaaggaaggatggacggaaacctcgacttggaggtgccagggcagcaaacatccttgttctgatgcaagcaggccaggcctgtgggagaatgagccagagaaaagctaagtcaaatcccagtggtgtgtgtcctggaactagagcccatcctggagctcagccaagaacactaaaaaaaaaaaaaaaaaaaaaaatctggaatgattttttggatcaaatttggacttctcttgagtgttgctgtattctttacagtaatttgatatcttctattatgagcctaacaagaggatccaagccacttaatcccagccaaactgctgtatgcaattaccataggttcctgtttggattcctggcacgaaattgcctggcttccttgagtttgacttggatccctgtgttgtcccagctcttcagtgtccatccagcagaaactaacagggcgcctgctgtacccaggcattctgctggggctggggacgcatagagaggacagggtccctccttcacagctcataggctcttcaggggcaattccagcacatagtggcggtgttctgaaggaggaggctctgggagcttcatgagccccacaatcttcctttgaatgtgagggaaggcttcctggaggaggtggcatctaagctgaaatgagtgggactttgccaggtgtgtggggaaggtggtccaagaaaggggaacagcatgttcaaaggcccagaggcaggaggcagtaaagggccctttccatcctgcagctgccagccttaccccactggaccctttcagggttcttcatgagactgggttttttttagagacagggtctcactctgtcagccaggctggagtgcagtggtgtgatcacagttcattgcagcctcaatttcctgagctcaagcgatcctcccacctcagcctctcaagtagctgggaccacaggtatgcaccaccacactaggcctttttttttttttttttttttcttgagacggagctcgctctgtcacccaggctggagtgcagtgacgcaatctcgactcactgcaagctccgcctcccaggttcacgccattctcctgcctcagcctcccgagtagctgggactacaggcgcccgccaccatgcccagctaattttttgtatttttagtagagacggggtttcaccgtgttagccaggatgatcttgatcgcctgacctcgtgatccacctgcctcagcctcccaaagtgctgggattacaggtatgagccacggcacccggcctttgttttttctttcctttttttttttttttacatttttagtagagacaaggtctcaccatgtcacccaggctgatcgcaaactcctgggctcaagcaattctcccaccttggcttcccaaagtatcaggattataggtgtgagccaccacacccagctgacattgggcatttatggtacaaaacctccctcaggtacaacgctccaaaagagccagtttccagcattgaattcatcgtggacttacccatgtgtggttctggcaccctgcccggggctggaggctgttcttggccttggtcctttagaataggagtaaatttggcaacataggaggacacccaggatacattgttaagttaaaaaaaaagagattctaaaatagaatgtatgtatggttctatttttgttaaaagttatgttctctaagtctttttaaaaagtttgaactgtcacagccaagaagggtctaaagagacatgacagctcagtggtgtgtgagtcctggatgggatcctggaacagaaaatggatatcaggggaaaaactgaggaaatctggctcatattttgttgtgtgtagataccagcattatccaggttttaaaaaggagaaaatcctggccgggtgtggtggctcacgccagtaatcccaacactttgagaggccaaggtgggaggatggcttgagccagtagtttgagaccagcctgggcaacatagcgagaccccttctctacaaaaaaaaataacaaaaataggctagacatggtgttgcccacctgtagtcccagctacttgagaggctgaggtgggaggatcacttgagcctgggaggttgaggctgcagtgagccgtgattgtgccactgcacttcagcctgggcaacacagtgagacctcatctctaaaagaagaagaaaaaaaaaggaaatcctgcaatgtgtgacaacatgaataaactctgaggaaataatgctaagtgaagtaagccagggacaggacaaataccgcatgattccacctatagaaggaatctgaaatagtcaaactcagcagaagcagagaggagaagggtggttgtcaggggctggggaataggggaaacggcattgctgatcgttgctgtgtaaagtttgagtcctgccagccgaatacatcctagagatgggctgtacagcagagcgccgtcagtgttggacacttacaatctgttaaaagggtaggacccatattaagtgttctcgccatataataaaaagtgtaaacactaaggaaatcaatggactttatagttaataatatctcagtctggttcgttaattgtaataaatgtaccatgctaacataaaatattaataatggaggaaacccggtgggtgtgaggtatatgggagttttctggactctttgcagtttttcagcaatctaaaactgttccaaaataaagtttagacagacaacaccatgttttctttagagagtgggattacatgtgagtcttccccctttggcttatctgtgttttctaagttttctacagtaaacatgtattatttgtataatatattaacgacagaacagaacattagctagaccatgctgactgcaccagccctggtggcagagagttccaagcatggcagccgccctcactgtgaatgccgtaaggccccaggtgctgtccagggcactggcctgggaaggggctgccttcttttgatatgcagaggccccaagtcagtccagaggagacaagaatccattcacctgcccttggctatgatgatgttttcagcattgcacttaaaaaaaaatcttccactttattttattttaattttttgagatggagtcttgctctgttgcccaggctggagtgtggtggtgtgatctcggctcagtgcaacctctgcttcccaggttcaagcgattctcttgcctcagcctcccgagtagctggaattgcaggcgcctgtcagcatgcccgggtaatttttttgtatttttagtagagacggggtttcaccatgttggccaggctggtcttgagctcctgaccttaggtgatccacccgcctcagccttccaaagtgctgggattacaggcgtgacgaccacaccaggcccaaaaatcctccactttaaagaaaatatcatttggtaatcagaaaaaggtgacattttgtcaatgtgtatgaaaaaaattatgcatttaatacctgttcattgtagaaaaattggaaagtacataaaactcaaagagaaattaaaagcactggaatctactgctcaggaaaactgctttttacattcttggagtttatcctcccagacttttaaaattcaccaatacatggtataagtacagtataagcatagatgactttttataaaaactgggtcacacaatggatatgacttgatcatttgcttttacctcccagcaatatcttctgatcagttttctatgttaaataaatatacatctaccttgtcagtttagatgactgtactggactccagtatactgtcaaactatacttgattaatcctgtattgctggatacgtggggctttctccctaccctccagattttaaattattgaacaagtatttatggaggcctgctgtgagccaggagctgtcctgagccctggaaacccagcagtggctgtacagacctggcccagctgtcagggggcacctctaaggaaaccgggaggcaataatcgtagctcccttgcagggaggttgtgaaggctgagtgaggacatctgtgcacctggagcacagtgtgagtgtgaaaccagtgtcagcccttattactgtcaataccatgaaggggcggcgggggcactaagggtggcaggactcaatatctaggctctggggggtgccagagcctgaccgtgcagggtcttctctctccctccaccctgactgtgctctgtccccccagggctggacatccacttcatccacgtgaagcccccccagctgcccgcaggccgtaccccgaagcccttgctgatggtgcacggctggcccggctctttctacgagttttataagatcatcccactcctgactgaccccaagaaccatggcctgagcgatgagcacgtttttgaagtcatctgcccttccatccctggctatggcttctcagaggcatcctccaagaagggtacggggctgctagaggttccataactgccccgtcctcgccaagggtgggcccggtgttcccaccaggctctccttccggcggggtgagcagggagttggcccgaggaagctgggaaaggaggggcctgagaggccggccccagacacaccgccctccgggctggagatgccacccctatatttgggctccaggattccttcttgcctctgtgagcttttctgacctccacctgggggtaggcgggtcctgagaaatttcatagaacaccagagggcccaaggagcaatctgcctgtgactccgtgactccatgcctttccccatcactgccagggttcaactcggtggccaccgccaggatcttttacaagctgatgctgcggctgggcttccaggaattctacattcaaggaggggactgggggtccctgatctgcactaatatggcccagctggtgcccaggtgaggtcactgttggggtggtgtgtgtgtgtgtgtgtgtgtgtgtgtgtgtgtgtgtgtcctctaagaagtggacctgtgtgcagggtgggccaaggacccccaggggagaggagggagtgtgacctgtcactcagcagtgcctgaggcatgttgacttggatcctcctgtctgtaacccagggttgcggctctgggtcaggttcccaggcagagaaggcctgtgataggaggggaaggtcaggcattagacctctctgctgaccaagctctgggatagccctgagcagaactccccagaaactgtatttttcccccaacctcccttctccaactcccatgcctccagtggggccagtgctgaaagaggctggctctgtgctcgctcctcagccctgaggcctgttcctccgccatctctcctctctccctgtccttgacaccagcccagcctcaccccggcccctctctctgccttcagccacgtgaaaggcctgcacttgaacatggctttggttttaagcaacttctctaccctgaccctcctcctgggacagcgtttcgggaggtttcttggcctcactgagagggatgtggagctgctgtaccccgtcaaggagaaggtattctacagcctgatgagggagagcggctacatgcacatccagtgcaccaagcctgacaccgtaggtgagtgtgctcaggggtcctcgcccactgccggctccactggggcagggagacaccgcggggtaacctcaccaccccaccccaatgctgcccacagaaggaagcctcttgtaaggacctcccagctctttagatctttaaactgcattttcccatagaatcaagaggatggaccctcagcagattcccaggccaatttagcaactctgtttagccgactcagtattcatagtggctttcacccctgatctcccacccctgagtctatatcctacactgagaagcagagggatggagggggtgaggtaggaggaatcctgggagtgggcagctctggggctgcaggggagaggggagagggtgccctggggccttggggaagaggttcccaggcagtgagggagggcccagcaaccatgtctgccaccagggtcctgttaaaggacaatactttttcaaaaaggtaaatttataaaggaaccagtaaaattttaaaaagaaacaattcaaagacaaataagaacactgaaattaatttgctaacagacacaaaacttgtcaacatccacagagtaatatcaattaaatctccatgggacaaaattcatttgcctctatgaacaagagtcattcgcattaccctcagttctttacaattcacagaactgtaaaatagctcaatgacaaggaaagatgggacccctgtagcatcacgtcagtccggaaggtctgctaggtaactccctagatcttgtccagaagacacccaggaattgtcttgcccatctcaaagttcttcatagttttcatggcaaacccatgcccacacacacgaggcagctcataatcataataatggcactttataaaagtcagcatttttctctgattataaaatacatgttgtcaaaaagcttaaaaatgcaaaaagtacaaaacattaaagacaatctcatataacctcttctccctccccacatcccctctccttcaaaagaacttgtgaacattttggtgagaattttcacaagtgaagtacgtccatctcaccaacatggccccaacactccagatgccctcggggttctctcccaggtaccacgctctgacttctgactgagatggttttgattgtgcctgtttaagtcctatgaatagaatcacagagtatatacccttgagtctggcttcttttgctcaatattatgtttgtgagattcatttatgccattgtcccagctttatttatttattttttctcaagacccagtctggctctgttgcccagggtagagtgcagtggtgtgatctcagctcactgcaacctccgcctcccaggttcaagcaattctcctgcctcagcctcccaagtagctgggattacagcacctgccaccatgcctggctaatgttttgtatttttagtagagacggggttttaccatgttggccaggctggtctcgaactcctgacctcaggtgatccacccgcctcggcctcccaaagtgctgggattacaggtgtgagccaccgcacccagcctgtcccactgtcccagccttttttttttttttttttgagacagagtcttgctctgttgcccaggctagagtgcagtggtacgatctcggctcactgcaacctccactcccgggttcaagcaatttgcctgcctcagcctcccaagtagctgggattacaggcatgcaccaccatgccctgctaatttttttgtatttttaatagagatggggtttcaccatgtcagccaggatagtctcgaactccttaccgcaggtgatccacctttctcgccctcccaaagtgctgggattacaggcatgagccaatgcccccagcctgttccagccatttttaatgactggacagtattttggcttaggagtatatcaatatttgtaactgatcccctattttagacttttttaggtggcttctcatttttcatgaatcagagcacatagactgaaaaaccccgcctttttaaaaacagcacttctcattgggaccccaccaaatgcagagcgtaggcccttcagtttgaaggaagctgagcagcagtgtgccaggccctgggagacagtgggaaggtatcgtccctgtttatcagatgaggatgccgaggcagagttaaggaagcgaggcatgtgagcacccaggagttaaggcaggcctgtgctcgaacgtggcttcctgcacacagcccgccctctgcggccagtgccacacatcacacctgaagctccagctctctggtccccaggcctgagtctctcccttgctccccgctcccgccaggctctgctctgaatgactctcctgtgggtctggctgcctatattctagagaagttttccacctggaccaatacggaattccgatacctggaggatggaggcctggaaaggtgaggccctggtttgccccctgcagtcatgaccctggtcccagcagccaacctcctcaccctcttcatcccccttgtctggttgctctgcatgggggcactcagcaaattctattgttggctttcttacaaatcctcaccctgtgaccaacgtagctgcattttttgggtgaggtggcctggttgggttgttcccagcctcacagtgcatggtcaagactaggatgcaggctcacctgcttgtgctccttttgctgaacaggcctctggggattagggagcccacagcgagcaggcaccacattattgtcaagagcacctgggcttttcctcctgattccctggaagagcctggcatcagggtcacgtgactgcgtgttccaggagggtggtcgcagaaagacaggaggctgttaatctctcagagccttagaggctgtatcctctacatgcctgactccccagctctgtggcctgactcaggcttcaccaaggtcagctctgacccacctttccagggcccatccctttattccttcagtgacacacaggaccagacagtgctggggatgggaaagacagtaaaatgagactgaatcctgccttgggggtagggactctgtcttggccatgctgtagccccatcacctagaacaatgccgggtgaacagtgggagagcccagtacatagatgttgaatgaatgcgcaaaggactgtgagagtccagtggaaggaggattctttgtctaagcggcagagaggggaaatgaccaggagaatgtatctgatttgggccttggaggataagtaggagtttgctggatggaggagagaaacttaggcaaagagaaaagcaataaaaatgcaaggaaagggtgcttggaaagggtggcttgtccagaggctgaagcaggtacactggggccagatcaaaagcaaactcattctgcaggcaggtcctcacctcctccaagagcctcagcagggccttcgtctgggatctgtttcccctgccctacattcagcaggacacaggggttgatggagcttctgcaagaccaccttggcagggggtctggcctgctccttgcacacggatacctggagcaagatgtgaggccccaccagactatcccactaggccactcctgcagctctggccccgggttacagggagcaccaaatccctgagcaggaggtagacaggatcagatctgtgttctagaaagaacaggaatacactagggtggaaatggtggtcgtggtcgttttcaagctgcggcagagccgaaagggagatggaagcacttggccaacttgcagaaatccagttcacagaggtgatgtgtatactggaactagttttcattgaccagttttcattttgccaccaaaatcacattgaaaaggctgttccctttatctctgtccctgctccctgctgctgttgctagagattcagggtttgagtgaggaaggtagggttgggagggcgtgctctggggaaagtggaaggtggggtgggggctgtggagtatgcatcctggacccaagctggctaggtttggattctccacttaataagtaaaaatggagataatagtacctatgtcccataggctgttgagaggaaaacatgaattaaaaagaaggtaaggagcttagaacatgctgcctggtatgtggtcaccacagtagctggtgccctgagcagtttcacggtgcaggggttgaggggagggaggagaggtcagtggcaggagagaggggacaggtgtgtagaggcaaggtgggtggggggaggaccttggggtgataagagacacttcaactaaatccatgcgctccagtctagtgccctggcgcagcctgcctgtgacacgaggataccacacacgttgcatgaggtctgaggagggaagccgcatgggcagggcctggcatttgtaggactttctggctgccctttgtcacacaactgcatgtggcactgagagtggggctttgtgttctgcgttcccaggaagttctccctggacgacctgctgaccaatgtcatgctctactggacaacaggcaccatcatctcctcccagcgcttctacaaggagaacctgggacagggctggatgacccagaagcatgagcggtgagcctggctgagccgagaacaggggcctctgaggctggaggcagggggacggccagtcttgggctccacgaagggcacttggtggtgggataagtatagccttgcctgcaggtgccccagggcccttggatgggaacactaaaggtcgaggtgtttggagaaagccctcatggagggaccaggtgcctggctcccgggcggccctcagtaccgctccccagtctaggatgctggtctggagtggcactgatggttctgggatttccaagtctcacatggaaaccctcaaaggtggggatttagaggctgtcccatgccccctgcctgggtggccctcccagaaaagagaaggccctcagtgaggggagagcggttgagaccctggatttgtccttttctttatggctccttgtgggtgggccagctgatctcacccccaggcgctttaaccccctgctgtgcagacggaggggcgcagggccacagcctcacccctccgtcggctctttcacttccaggatgaaggtctatgtgcccactggcttctctgccttcccttttgagctattgcacacgcctgaaaagtgggtgaggttcaagtacccaaagctcatctcctattcctacatggttcgtgggggccactttgcggcctttgaggagccggagctgctcgcccaggacatccgcaagttcctgtcggtgctggagcggcaatgacccacccctctccccccgcctgccacctccccccacaagtgccctccaggcttttcttggggaagataccccttttctgaggaatgagtttgcctccgtcccctgcccatgctgggagcccacgctcaccccctcacccctccaagctcactccccaacccccaactccgtgtggtaagcaacatggctttgatgataaacgactttactctaaaagcggctggaactcagtgacatgagcgtgcgctgaccccacatgggccccctgtgcaagcagagctggccggccccctccttgctggcagaggcacgggaggcctgctggggatgaggccactggccagggctatgctgcaccagaccaatggcaccgccccacccctcccagcgcaggggcagcttggagcagaggcagcactggccaccactgcgggggcaagtcagcgtcaagagagtccctgagtgagaaggcccagataagcccaggccccccaggcagcggacaggcacaggcagggctacagaggtgccaaggccccaggcagttgtgctaggagcctggacctgctcttccacatcctcccattacccacccctactgcatcaggcttataccttggtgccccctggaggcagcagggaggaggcttctcaggcagaagtcttaagttgcatcccattccccagaatccccaggagggagaagagggatgggctgcccctccttcctgccagagccacagctcaagggcagtgggatggccctgcacccagcccaggtaccccttcctctgtgccgaccatgctgtcctttggctccgaggaggccctgagcactgcccacccccacaccttggagggagcagacggagggggtgagtactgcacagagcctgcctggaggtgcagactcatgcactcggccctgaagaggtgagagaggctggatcttaactgtggtccaatgggcatattatgagtggtccttgtccctgcctgctatggggtaaccctgacccagctagcgtccctgacaacatgatacaaaaacacagaactctagcggatacagagatgtgtgcacagctggcaggagcactggccacctcccaacctgttccccatagcttactcctggatgtgagcctggagggactgctgggctggggagggactggccatggagcagggagctggatgccagcggacctcagacctggactgcagcatctctttggttatcggttgtgtgtgtgctcagaagggaggaggccttccccttgttacatctctctctccatatattctcccggactcatcagtttggggggcgaaaagtccaccacatggtcttggcgacaaaccactggggatgtcaccccagctgcagagctggaagcttgtgccggagggaaactgggtgagcaagggaggggcgaggctgcctgtgctctcctcaccactgctgggaccagaaaagatgggcacctgatagctcagctgggcagtcccaacgcattcccactcagccaagggcctgagcccaggccattctggttgtgtcttttcagagcagtgagacctaaaacagatgggaagaagtcatgaacttgggagtcaggccgcttcacctgtcttctcaccccacaggctcccctgagctggcccagccagcagctcacccagcctcaggcctcctggggggcagcagccacactgcccgtctgcgccaagcactgtccagggatagtcccgctgatgttgtggatggcaccataggtctgctgctgctgctgctgcggagacagtgctgtcctctccgaggccaagccgttcagaatccgaggcacgtagggctgtcagcaaatggatttgtgcttggcctggacagcgatgagcttccacactgcatccctcccctcctgcccttctcccaacaggacacagacagtggccataaaggacatatgaagaaacaccgacatccatttaggacattaagaccgaaaatatgacacctgcagaatttcctagcagccagggcaaaagagaaagcacagttatacagttctcatgatcacagaaggaagcacaagagagcagttctcagaggaaactaaacttcctagccctggatcctaggaggatttctcactttgtagaagaaacaagtctacctatataggggggcttagaacgctgccctgggacccctgggatgctcaacatatctgtgtgagtctcattttgagtctcatttcctcccaatcccaggctccagcactgaccccaggcacagagccctgccatactcctcctgagaccctggctgtgagggcttgacatcatccacctgtcctgcatgttccctgcttggccagcatagccacaggtgtgtcgctgggtaatgagtccttctgaggccctcccttgtttggaacttgtccaaggacagacaccgataagagagcctgacacctgggaggcagccaccagaaagaaccctgcagatgaggtcggctctgtcctggccacggctgtcaggaaggctggtgactacagctctggaaccctggggctctgctttcccttcccagccccaccctaggagcaggaccctggaggctgtgtgcagagagaactaggaaggcaaggagccctgtgtctctctaccatggggtcttcctctgaagcaggtgcaatgttcatttctt

SEQ ID NO: 806 - DNA, 464 bp, Homo sapiens
tcccggggtcagtgccgtagcgcccggctcctgcaggcgctcggcctccgctcattcctgaccccgcagtgggcgcgatggcggaggctgtactgagggtcgcccggcggcagctgagccagcgcggcgggtctggagcccccatcctcctgcggcagatgttcgagcctgtgagctacaccttcacgtacctgctgggtgacagagagtcccgggaggccgttctgatcgacccagtcctggaaacagcgcctcgggatgcccagctgatcaaggagctggggctgcggctgctctatgctgtgaatacccactgccacgcggaccacattacaggctcggggctgctccgttccctcctccctggctgccagtctgtcatctcccgccttagtggggcccaggctgacttacacattgaggatggagactccatccgcttcgggcgcttcgcgttggagacc

SEQ ID NO: 807 - DNA, 2336 bp, Homo sapiens
ggcgatttcaactctcgaatgggaggaggcagtatagaggtatctgtgcctaggtttgctgtggggattgtaataggaagaaacggggaaatgatcaaaaagatccagaatgatgctggtgtgaggattcagtttaaaccagatgatgggattagtccagaaagagctgcccaggtcatgggccctccggatcggtgtcagcatgcagcgcatatcatcagcgagctgattcttacagcccaggaaagagacggctttggaggcctggcagcagccagaggaagaggtcgtggccgtggcgactggagcgtgggagcccctggtggcgtccaggagataacatacacggtgccagccgataagtgtggcctcgtcataggcaaagggggtgagaacatcaaaagcatcaaccagcagtcaggggcgcacgtggagcttcagaggaacccccctcccaacagcgaccccaacctgcggagattcaccatcaggggggttccccagcagatcgaggtggccaggcagctcatagatgagaaagttggcgggaccaatctcggagcacctggagccttcggacagagtccattcagccagccacctgccccacctcatcaaaatacctttcctccaaggagctccgggtgcttcccaaacatggctgccaaggtgaatgggaacccccacagcacccctgtgagtggtcctccggcctttctgacccagggctggggcagcacctaccaggcgtggcagcagcccacacagcaggtcccaagccagcagagccagccgcagagcagccagcccaactacagcaaggcctgggaagactattacaaaaaaacagagtcacgccgccagcgctgctcctcaggccagctccccaccagactacacaatggcctgggcagaatattacagacagcaggtcgctttctacggacagacgttagggcaggcgcaggcccacagccaggagcagtaggacagcgtcctcgtggccaactctcccctcaaaatcattgtcaaagaaaacctatttgtaacagaggtttttacatttgcaaaccttttgatgaagaactgttgttttgttctgtgaaacactatatttagattaacggaatttttctaaaaatcaggaaaattagttactaaaaattgctgatcatttttgtttcattatttttgttatttcaaatgtataagctctgggattctttttggagcaatacctacaaagtcaggcaccagaatgtgcctcagagctgtgacatttcaacatgatggttttggtttggtttggttttgtgtcctttttatttgcagttttttctgttgcaacagaaagtggcttggaagtcttaggtggtatgtaacaaattctttttaaaaattttaaagcagtatttaagtattcttaaatgtgtaaattcatttaatgttttacttctaatttcttgtatcttggctgtctggttttattgcatttttaaaaaaactgaactattatgtattgtaatgaatgatgtgaattctgaactgagacagataattgtattgctgtccaacaggggttgggaggggcattttgtagggtttgtataatttctagagttcgaaaggggtaatataaaaatgtgctcgtgtgtttagcctacgtttttctcatgcctccattaccagttgcaattgtgtatctaagacctccaagcttgtttttaaaacaaaacaaaaaacctttctctattatctcagaaatataaatactgttatttttaatattaagaaattcaatataacttttaacacacactgtggaacattaaaccgtataaaaatgtagttataactatttttaattccaaggtgttgtttgcttttttcttttaaatattttcttaatattttgtcagattaactagatgaataaataaatctagtattaaccgcattatgaattaaataattttgatttaatgaaagggataatatgatttccagtgtttactgtagtgtatcttgtacagataacatgtatttttaaaggaaaaaaaacggaattgaagctattttttcttgcatttctaattgacctgagggacattccgtttgaaatgtactgaagttacagtttctggttttttctccttatttttcttataatgcttgaaatgtctaactattaaaaaagacaattggaaaatgttatgcatggggtttttaagaaaacaaagtgttctttttatttgactgacaattcattttacactctatataataaaatctccacaaggcatcttgtgggcaaagtcaaaaaaaaaaaaaaaaaa

SEQ ID NO: 808 - DNA, 5185 bp, Homo sapiens
agcggagatggcggcagggtcgggtgggagtgggggctctgggggaggccctggaccggggccgggcgggggtgggggccccagcgggagcggctcaggaccggggtccaacgggggtctgggcagcggcggggaactgcacccgcgcactgggcgcttggtgagcctgtcggcctgtgggcgtacggcgcggcggcagcagccgggccaggagtttaaccacgggctggtgttgagccgagaacccttgcgcgatggacgcgtcttcaccgtccgcatcgaccgcaaggtcaactcctggagcggctccattgagattggggtgacagcgctggaccccagtgtgctggactttccaagcagtgccacgggcctgaaggggggctcgtgggtagtgtcgggctgctctgtgctgagagatggacgctctgtgttggaggagtatggtcaggacctggaccagcttggtgaaggggaccgcgtgggcgtggagcgcacagttgctggggagcttcggctctgggtgaatgggcgggattgcggtgtggctgccacaggcctgccccctcgtgtctgggccgtcgtggacctttatggcaagtgcacccagatcaccgtgctaccccctgagccaggcttcagcccccctactcccatccccacacctcccctcgagcccttggcccccactgaagactctgccttggctgaacaggggacctctgcagatgaagccttcatggtgtccccagcgcaggcccggccggagacgtttcctaacagccttgagtcgcataatgactttgccaacatggagctgtctgaggtggtgagcaacaccatcctgtctgcctacaatggagggctcctgaatgtgaacctgagctccccaccggcaggggaaggcctgggatctagcggtgctgccacctcgcccattctcacttccaacgatgccctgctctttcatgaaaagtgcgggaccctcatcaaactcagcaacaataataagacggctgagcgccggcggcccctggatgaattcaacaatggggttgtcatgaccaatcgcccccttcgggacaatgagatgtttgagatccgtatcgacaagcttgttgataagtggtcaggctccattgagattggggtcaccacccacaaccccaacagtttggagtacccagccaccatgaccaacctccagtcaggcaccatcatgatgagcggctgtggaatcctgaccaatggcaagggcacccgccgggagtactgcgaattcagtctggatgagttgcaggagggtgaccacattggcctcacaaggaagtccaactctgccctacacttcttcattaatggtatcgatcagggagtggcaacccccttgacgcccccagtggtgtatggtgtggtggacttgtacgggatggcagtgaaggtgaccatcgtccacaataacaaccacagtgaccgtctccgccgaaacaacgccatcctgcgggcgctgtcccccgagggtgctctccgccgtgctgcccctgccgcccaggcagaacctgagcgcctgctcttccaccccaactgtgggcagaaggcagccatcacccacgagggacgcactgccctgaggccccatgccaccgatgacttcaatcacggcgtggtgctgagcagcagagccctgcgggatggagaggtgttccaggtgcgcatcgacaagatggtggacaaatgggctggctccattgaaattggtgtcaccacccacaaccctgcctacctccagttgccctccaccatgaccaacttgcgctctgggacctggatgatgactgggaatggggtgatgcacaatgggacgaccatcctggatgaatacgggcacaatctggaccgcctcaaggcaggggacacggtgggcgtggtacggcgggaggacgggactctccacttctttgtcaatgggatgactcagggccctgctgcctggaacgtgcccccgggcgtctatgctgtcgtcgatctctatggccaggcggcccaggccaccattgtggacgacgtggaggtggctccagttcctgaaccactccctgaggggaacaaccaggtgtctccaagctctccgtcctcaggggccgggggctctgacctgcgcttccatcagctgcacggcagtaacgcagtcatcactaacgggggccgcaccgccctccgccacaactgtcgcagcgagtttaatgacgccatcgtcatctccaaccgggccctgcgggatggagagctgtttgaaattgtcattcagaagatggtggaccgctggtcaggctccattgaggctggagtgactgctattcggcctgaagacctggaattccccaacaccatgacagacattgactatgacacatggatgctgagtggtacagccatcatgcaagacggtaacacgatgcgcaacaattatgggtgtgacctggatgcgctgggcacaggtgcacgcattggcatgatgcgaactgccaagggcgacctgcactacttcatcaacggccaggaccaaggcgctgcctgctcgggcctgcctccgggtaaagaggtgtatgcggtagtcgatctctatggccagtgtgtccaagtgtccatcaccaatgccaccggccccatggacaacagcctggcgaccagcaacactgccaccgagaagtccttcccactgcactccccagtggctggcgtggctcaccgattccacagtacttgcggcaagaacgtcactctagaggaggatggcacgagggcagtgcgtgccgctggctatgctcatggccttgtcttcagtaccaaggagctgagggctgaggaagtctttgaggtgaaagtggaagagctagatgagaagtgggcaggttccctgcggctggggctgaccacactagcaccgggggagatgggacccggggcaggcggtggtggcccagggctgcctccttccctgccagagctccggacgaagaccacttggatggtatccagctgtgaagtgaggcgtgatgggcagctccagaggatgaactatggccggaacctagagaggctgggggtggggagccgtgtgggtgttcgtcggggggcagatgacacgatgcacatcctggtggatggagaggatatggggcctgcagccactggcattgccaagaacgtgtgggctgtgttggatctctacgggccagtccgcggtgtgtcaattgtcagttccacgagactggaggagtcagaaggcacccagcctccttcccccagttcagacaccggcagtgagggcgaggaggatgacgagggcgaggagcatggcctgggaggccagaatgaagtgggtattatacccaccaccctcgagttcctggagaaccatgggaagaatatccttttgtctaatgggaaccgtacggccacacgggtggccagctacaatcagggcatcgttgtcatcaaccaacctctggtgccccagctgctggtgcaggtgcggatagatttcctaaaccgacagtggacatcttcccttgtcctgggagtcatcacctgcgcgcctgagaggctcaacttccctgcttctgcctgtgccctcaaacgggcagcctggctgctgcggggccgtggggtcttccacaacggtctcaagatctgcgagaagtttgggcccaatctggacacgtgccctgaaggcaccatcctgggactgcggctggacagctctggggggctgcatcttcatgttaatggggtggaccagggggtagctgtgccagatgtgccccagccctgccatgcgcttgtggacctctatgggcagtgtgagcaggtgacaatcgtgaaccctgagccaggggctgccagtgggaaaagtgctggaacccaaggggacatggagaaagcagacatggtggacggtatcaaagagagtgtgtgctggggtccaccacctgccgctagtcctctaaagagctgcgagtaccatgccctttgctctcgcttccaagaactcctgctgcttcccgaagattatttcatgcctccgccaaagcgaagcctgtgctactgtgagtcttgccggaagctgcgaggagacgaggcccacaggcgcagaggggagcctccccgggaatatgcactgccctttggctggtgcaggttcaacctcagagtgaatccccgcctggaggctgggacactaaccaagaagtggcacatggcatatcacgggagcaatgttgccgctgtacggagagtgctggaccgaggggagctgggagcaggtactgcctccatcctgagctgccgtcctttgaagggagaacctggggtagggttcgaggagcctggcgagaactgtgcacctcctcgggaggagcagccccctcctgtgctgctttccccctcccttcaatatgctggggcggagaccctggcctccaaagtgcaattccgggaccccaaatcccagcggacgcaccaggctcaggtggcgttccaggtgtgtgtgcgccctggctcctacaccccgggacccccttccgctgcccttggagaacctcctgaccctcacttcagtccagccgaacttgagtgggtcactaaggagaagggggccacactcctctgtgccctgctggtacgggtggaatgaggggtgagacaccactactacaagcacagtcgggccgcgggcccatggactctgagtggcgactgcctccacctcattcccgtgactcgtggcatgcgcaggtgctggagcttggcagccgcgcaggagcatgtaggcaggctctcagatgtaggtggcaagtggcacagctccatgtccggaggcccagcactccgtctgatgggaggagtcgtgggagcccagctccaggccctggtacccctcttcatgcactgatttggggaacatgactcccttttactcccctaccccacatcacttaatttatttccgtttttgtttctggttactgtgaatcccagaggagtctctccctgtgcccacatgaagctgctttttccggggccaccgggcgggagtggggaagggtgggcgcacggaagatgggggcctctgtacagttgttactgactctgatttctaaggagccaataaacaccgtctcag

SEQ ID NO: 809 - DNA, 2034 bp, Homo sapiens
atgagagaagaccattcttttcatgttcgttacagaatggaagcttcttgcctagagctggccttggaaggggaacgtctatgtaaatcaggagactgccgcgctggcgtgtcattctttgaagctgcagttcaagttggaactgaagacctaaaaacacttagcgctatttacagccagttgggcaatgcttatttctatttgcatgattatgccaaagcattagaatatcaccatcatgatttaacccttgcaaggactattggagaccagctgggggaagcgaaagctagtggtaatctgggaaacaccttaaaagttcttgggaattttgacgaagccatagtttgttgtcagcgacacctagatatttccagagagcttaatgacaaggtgggagaagcaagagcactttacaatcttgggaatgtgtatcatgccaaagggaaaagttttggttgccctggtccccaggatgtaggagaatttccagaagaagtgagagatgctctgcaggcagccgtggatttttatgaggaaaacctatcattagtgactgctttgggtgaccgagcggcacaaggacgtgcctttggaaatcttggaaacacacattacctccttggcaacttcagggatgcagttatagctcatgagcagcgtctccttattgcaaaagaatttggagataaagcagctgaaagaagagcatatagcaaccttggaaatgcatatatatttcttggtgaatttgaaactgcctcggaatactacaagaagacactactgttggcccgacagcttaaagaccgagctgtagaagcacagtcttgttacagtcttggaaatacatatactttacttcaagactatgaaaaggccattgattatcatctgaagcacttagcaattgctcaagagctgaatgatagaattggtgaaggaagagcatgttggagcttaggaaatgcatacacagcactaggaaatcatgatcaagcaatgcattttgctgaaaagcacttggaaatttcaagagaggttggggataaaagtggtgaactaacagcacgacttaatctctcagaccttcaaatggttcttggtctgagctacagcacaaataactccataatgtctgaaaatactgaaattgatagcagtttgaatggtgtacgccccaagttgggacgccggcatagtatggaaaatatggaacttatgaagttaacaccagaaaaggtacagaactggaacagtgaaattcttgctaagcaaaaacctcttattgccaaaccttctgcaaagctactctttgtcaacagactgaaggggaaaaaatacaaaacgaattcctccactaaagttctccaagatgccagtaattctattgaccaccgaattccaaattctcagaggaaaatcagtgcagatactattggagatgaagggttctttgacttattaagccgatttcaaagcaataggatggatgatcagagatgttgcttacaagaaaagaactgccatacagcttcaacaacaacttcttccactccccctaaaatgatgctaaaaacatcatctgttcctgtggtatcccccaacacggatgagtttttagatcttcttgccagctcacagagtcgccgtctggatgaccagagggctagtttcagtaatttgccagggcttcgtctaacacaaaacagccagtcggtacttagccacctgatgactaatgacaacaaagaggctgatgaagatttctttgacatccttgtaaaatgtcaaggatccagattagatgatcaaagatgtgctccaccacctgctaccacaaagggtccgacagtaccagatgaagactttttcagccttattttacggtcccagggaaagagaatggatgaacagagagttcttttacaaagagatcaaaacagagacactgactttgggctaaaggactttttgcaaaataatgctttgttggagtttaaaaattcagggaaaaaatcggcagaccattag

SEQ ID NO: 810 - DNA, 885 bp, Homo sapiens
  misc_feature (236)..(236): n is a, c, g, or t
gaaaagtgcctcagcgtagcctgcctggacaagaatgagctcagtgaccacttggatgctatggactccaacctggataacctgcagaccatgctgagcagccacggcttcagcgtggacaccagtgccctgctggacctgttcagcccctcggtgaccgtgcccgacatgagcctgcctgaccttgacagcagcctggccagtatccaagagctcctgtctccccaggagccccncaggcctcccgaggcagagaacagcagcccggattcagggaagcagctggtgcactacacagcgcagccgctgttcctgctggaccccggctccgtggacaccgggagcaacgacctgccggtgctgtttgagctgggagagggctcctacttctccgaaggggacggcttcgccgaggaccccaccatctccctgctgacaggctcggagcctcccaaagccaaggaccccactgtctcctagaggccccggaggagctgggccagccgcccacccccacccccagtgcagggctggtcttggggaggcagggcagcctcgcggtcttgggcactggtgggtcggccgccatagccccagtaggacaaacgggctcgggtctgggcagcacctctggtcaggagggtcaccctggcctgccagtctgccttcccccaaccccgtgtcctgtggtttggttggggcttcacagccacacctggactgaccctgcaggttgttcatagtcagaattgtattttggatttttacacaactgtcccgttccccgctccacagagatacacagatatatacacacagtggatggacggacaagacaggcagagatctataaacagacaggctctaaaaaaaaaaaaaaaaaaa

SEQ ID NO: 811 - DNA, 1446 bp, Homo sapiens
atggctctctcttacagagtgtctgaacttcaaagcacaattcctgagcacattttgcagagcacctttgttcacgttatctcttctaactggtctggattacagacagaatcaataccagaggaaatgaaacagattgttgaggaacagggaaataaactgcactgggcagctcttctgatactcatggtgataatacccacaattggtggaaatacccttgttattctggctgtttcactggagaagaagctgcagtatgctactaattactttctaatgtccttggcggtggctgatttgctggttggattgtttgtgatgccaattgccctcttgacaataatgtttgaggctatgtggcccctcccacttgttctatgtcctgcctggttatttcttgacgttctcttttcaaccgcatccatcatgcatctctgtgccatttcagtggatcgttacatagccatcaaaaagccaatccaggccaatcaatataactcacgggctacagcattcatcaagattacagtggtgtggttaatttcaataggcattgccattccagtccctattaaagggatagagactgatgtggacaacccaaacaatatcacttgtgtgctgacaaaggaacgttttggcgatttcatgctctttggctcactggctgccttcttcacacctcttgcaattatgattgtcacctactttctcactatccatgctttacagaagaaggcttacttagtcaaaaacaagccacctcaacgcctaacatggttgactgtgtctacagttttccaaagggatgaaacaccttgctcgtcaccggaaaaggtggcaatgctggatggttctcgaaaggacaaggctctgcccaactcaggtgatgaaacacttatgcgaagaacatccacaattgggaaaaagtcagtgcagaccatttccaacgaacagagagcctcaaaggtcctagggattgtgtttttcctctttttgcttatgtggtgtcccttctttattacaaatataactttagttttatgtgattcctgtaaccaaactactctccaaatgctcctggagatatttgtgtggataggctatgtttcctcaggagtgaatcctttggtctacaccctcttcaataagacatttcgggatgcatttggccgatatatcacctgcaattaccgggccacaaagtcagtaaaaactctcagaaaacgctccagtaagatctacttccggaatccaatggcagagaactctaagtttttcaagaaacatggaattcgaaatgggattaaccctgccatgtaccagagtccaatgaggctccgaagttcaaccattcagtcttcatcaatcattctactagatacgcttctcctcactgaaaatgaaggtgacaaaactgaagagcaagttagttatgtatag

SEQ ID NO: 812 - DNA, 897 bp, Homo sapiens
ctgagcatggcggccaccaggtgcctgcgctggggcctgagccgagccggagtctggctgctcccaccgcccgcacggtgcccacgccgggcgctgcacaagcagaaagacggcactgagttcaagagcatctacagcctggacaagctctaccccgaatctcagggctcggacaccgcctggagggtcccgaatggtgcaaagcaagccgacagtgacatccctctagatcgcttgacaatatcttattgtcggagtagtggtcctggggggcagaatgtgaacaaagtgaattccaaggcagaagtcaggttccatttggcaactgccgagtggatcgcggagcccgtgcggcagaagatagccatcacgcataaaaacaagatcaacaggttaggagagttgatcctcacctctgagagcagccgctatcagttccggaatctggcagattgcctgcagaaaattcgagacatgatcactgaggccagccagacaccgaaggagccaacaaaagaagatgttaaacttcatagaatcaggatagaaaacatgaatcgggaaaggctgagacaaaagagaattcattctgctgtaaagacaagcaggagggtcgacatggactgaaatcaccctctgcagctgggagggctcttctgggcgtccgggcagctgcagctgagaggactttcacaccataaggagatttctgtttttctttttggctgttaatgcttgtctataacattggagccatcacaagaatgttcatttggaatgaaggctgcaggcactggttgcagacgtctttataggcagtcaccatgttgtcaaaccttaataatgcacctcatgtattagtcacaataaaaatcagaactcaaaaaaaaaaaaaaa

SEQ ID NO: 813 - DNA, 326663 bp, Homo sapiens
tgacaaacctgacaaaaaaaagcaatgaggaaaggattccctatttaataaatggtgctggaaaactggctagccatctgcagaaaactgaaactggacccccttccttacatcttatacaaaaattaactcaagatggattaaaggcttaaatgtaaaatccaaaaccagaaaaaccctagaagaaaacctaggcaataccattcaattcataggcatggacaaaaattttatgatgaaatcaccaaaagcagttgcaacaaaagctaaaattaacaaatgggatctaattaaagaacttctgcacagcaaaagaaactatcagaacaaacaggcaacctacagaatgggagaaaacttttacaatctatccatctcacaaaggcctaataccagaatttacaaggaacttaaacaaatttacaagaaaagaaaacatcaaaaagtgcgcaaaggatatggacagacacttctcaaaagaaggcatttatgcggccaacaaacatgaaaaaaagctcaacatcactgatcattagaggaatgcaaatcaaaaccacaatgagataccatctcatgccagtcagaatggctattattaaaaagtcaaagaacaacagatgctggcaagactgtagagaattagggaacgcttttacattttttggtgggaatgtaaattagttcaaccattttggaagatagtgtggtgattcttcaaggatctataaccagaaatatcatttgacccagcaatctcattactggatataaacccagagaaatataaatcattctattataaagacacatgcacatgtatctttattgcagcactattcataatagcaaagacatggaaccaacccaaatgcccaccaataattgactgaataaagaaaatgtggtacatatacactatggactactatgcagccacaaaaaggaacgagatcataccttttgcagggacatggatgaaactggaagccatgatcctcagcaaactaacacaggaacagaaaaccaaacactgcatgtgctcactcataagtgggagtcgaaaaatgaaaacacaaggacacagggaggggaacaacacacaccaggacctgtggggggtggtgaggggagggagagaaggacaaatagctaatgcatgcagggcttaaaacctacgtgacaggttgataggtgcagcaaaccaccatggctcacgtatacctatgtaacaaacccaacctgcacattccgcacgtgtatcccagaatttatagtaaaagaaaacttaaaaaaaaaaaaaaaaaagcagaagtcaaggatgatttgaaatgttggaatcggaaagaactggtcccaaatccagctgctgtgtttgaatccaagtggcaaattacagtcactgcagcaggggcccaaaagcacctagaactctgagaggggtaagtcttccccatttggaacagctttggtcccaagagggtggggaattaaacaagaaatcaataatacaaagacatcaggaaaacctacaaatttagaaaaaaatgcaatttaaaatattccataaaccaaagaaaaagtctcagtaaagtgttaaaaatatatttaactgaataaaaatgcaaatacaacatataaaaatctgtgggatgcagccaaaggtgcacataaagtatacagcgctgattattttagaaaataagaaagatctcaaataagcttgcacttcaagatacggatgtgaccaacaaacatatgaaaaaaagctcaacatcattgattattagagaaatgcaaatcaaaaccacaatgagataccatctcactccagtcagcatggagattattaaaaagtcaagaaacaacagatgctggcaaggctctggagaaataggaacacttttacactgttgatgggaatgtaaattagtttgaccattgtggaagacagtgtggtgattcctcaaagatctagaacaagaaataccgtttgaccacgcaatcccattactgggtatacacccaaaggaatataaatcattctgttataaagatgcatacatgtgtatgttcctcacagcactattcacaataacaaagacacggaatcaacccaaatgtccataaatgatagacttgatgaagaaaatgtggtacagatacaccatggaatactatgcagccataaaaagcaatgagatcatgccctttgcaaggacatagatggtgctagaagccattatcctcagcaaaccaacgcaggaacagaaaaccaaacactgcatgttctcatttacaagtgggagccgagcaataagaacacatggacacaggaaaaggaacaacacacactggggcctgttggggtggggatgcagttggggggctgagcatcaggataaatagctaatgcatgcagggcttaatacttaggtgatgggttgataggtgcagcaaaccaccgtggcatacatttacctgtgtaacaatcctgcacgccctgcacatgtatcctggaaattaaaataaaataaaatttttaaaagatatgaaaaaagcaaaagcaagcggaagaaagaggatagtaaaaataagagcgtaaatcaatgaaatttaaaactaacaatagaaaaaacaatgaaataaaaaatttaacaaaaatcaataaaattgatatcacccacagtaagacttattaaaaaaaaagagagaagacacaaattaatatcagaaataaaatggggaatatccctagaaaccctacaaacaataaaagtaagggaatcatatgaacaactctatttatatatatttggcaatttatattaaatggaccagttccttgaaaaccacaagctaacaaaacttattaaaaagaaatgcataaatctatatagtactatagttaataaagaaattgaatctgtagtttaaaactttcaaaaaagaaatgaaaaatttattagcgaattctattaagcactcatacaagatataacacccattttacataatctcttcccaaaattagaagaggaggaaacacttcctgattcattttatgagccattatgtctgcgataccaaagtcagacaaactaattataagaaaagtacagaccaatactcctcatgaatgcaaagttcttcaacaaaatattagcaaataaaattcagcaatatgtaaaaagaattatatgtaaaaggaataataataaagaaattataacattggttctatattcaatcaatgaatgtaatccatcatattaacagtataaagaagaaaacgtaatcctaacaacagacgcagaagaagcatttgacataatgtaatatacatttacaagaaacacttcctcaactgataagggcatctatcaaaaagcctacagctagcataatgtttaatggtgaaagactaaacgcttttcccttaagatttaaaacaaggctagaatgtctactttcaccactcctattcaatatcttactgaaagtcttagtgcaataaagaaggaaaaagaactaagaaccatacagattgggaaggaagaaataatatcatccctattttatttggcatgattgcttatgtagagcatcctaaggtatctacagaaatctcctagaactaataagtgagttaatcaaagtcacaggatagaatatcaacacacaaaaatccaacatatttctaaatactagcaatgaagatttggagaccacaatttttttaaatgccatttacaatagctaaaaaatatgtaggtataaatgtagcaaaacatgtatagaatgcgtatgcttaaaattacaaaacattgacggaaaacaagacaaccgaaagaaatggagagacaaactatgtttacagattggaagactcaacatattaacaatatttcccaaaatttttctatatatttaataaaattctaactaaaatcccagcaggatttttaatagatacagacaaggtaactctaaaatttatgtggaaaagaaaaggaacccaaatagtgaaaacaatttaaaagaataatgttgaaagacacactatgcagttttacaacctattatctgcatatagctacagtaataaatacagtgtgatattggtagacatacagatcgatggaacagaattatgtccagaaaatgatccacacaaataagttcaattgatttttgacagaggaaagatagtcttttcaaaaaatggttttacaaaatttgaacatgtataggaaaaacaaacatcttattttacctaacttcacaccttataaaaattaaatggatcatcaatctaaatgtaaaacatgatattgtgaaagatttacaagaaaacacaggagaaaaattctgtaagcttaagttatgcaatgatttcttagacatgaccaatggactgatgcatagaagaaaaattgataaattggacttcagcaaaatgaaaaattttgctgtgcgatacactgtaagaaaatgcaaatacaatctaaagacttgtgaaaatatgtttcaaattatatatctgataaaggacttgtactgaacatgtaaagagactcaacaatagttcaacaataagaaaacaatgcaattagaaaatgggttagagacctgaagagaaactttaccaaagaggatatatgaaagatgaatgtgcatatgaaaacatgttcagcgtcgctagctatcagggaaatgcaaattaaaaccacaatgatatatcactacaaacctatgagaaaggctaaaataaaaaatactgacaaagtgtcagtgagcaactggaattcatatacattgttggtgggaattcaaaatggtacagccactctggaaaacaggttgttttgttataaagttaaacatgcactaagcatataacccagctatagctctcttgaacattttccccagagatattaaaacttatatccacacaaaaacatatgtatctatgctcagagcagcttatttacaatagccccatattggaaacaactcaaatgtccctcaataggagaatagatcaacaaactatgatacacgtgtacaatggaatagtactcagcaataaaaaataaattgtcataggtatcaacttggatgaatctaaaaggcattatgctgagtcaaaaggctagtctcaagttgtattctatattatccacttatataacagtctccaaaaggtaaaactgtagtggtgaagaacaatatatgtgtgtaaaattctagactcctattctgttacattgaactatgtgtctgtacttagtgttggattatgagcgtctcaaaggaaacagccatatcacattcacctttgaactcccaataccttgcacatagtagactctctctaaaggttgctgatgaaagaatgctgactttgaaatttcacatatggaaatacaggtgggcaaattcagaaatagaacccaagtcatggcctttcacatctgtacacctccatctaccaatactgagaaatagcaactactccagcatatcttctttaagaataatcactctcagctctccctcattataactgctgtgcacaacagccaagctaaaggataggccatcacagaagtagccttgctctaagtaattccaaatcttgatgagctaagtttttgctcagatgatgagggggactttcatttgttcatcagtctccttggctgggaaatttatggtaattgacacggtaccctcaattatactgcaaatatttttttaaagaactgccagtgaaatttttcagatgggtctttcattatctcagattctgacaatttcaggccaaatccttagcataattttatagaagtcacagagtgtcaattttgtgagtctcggcaagtcatgtgttattttttttattggcttagaagttggtacgttttatgcttttgtagtttcgaggccagaatacagcagctgtccatttgctcatgtttataaggttggtagctgatggttacacccatatatgccatcaacatttgtggagactgtggcaatcagatatggccacattattccatgttggccaaacttcattcaaccatccaaaccaattatatgcctaataaattaaaataggccctgattctagtcttgtttgttataaacacattcaaataatcttaaggcaaatcacacaaaataaatgaattcagcaaaaacaaatccttttgcaaattaacattacacatttatcatttacccatgcagatagctaatcctgcaaaccactgtctccatggaagcacctatcaaagctcgtactctctgctgcatatatttcacatggaaatcccacactttcacattcagtctatgatcagaggctcatgtgtctgaagcttcatagtgtctctcagtccatgcatccaagctggctgggtcactgctctgggacagtatcctgcatgccaaatgataaaattagtgaatttaaataaatagaaactacagaaattctcaggttgtttgtcaactttgtgtaggtcacctgctgttgctttgcaggtatctttagtttggtagttctcagtgtgagctgcacattagaattacttgaggagctttttaaacacatcaatggccagaatttacaccagaacagttaactttgaatctctggaagtgagactgggcactgatatagtaaaaactttccaggtgtttccaatgtgctgctatagttgagaagtgcttctctggatgaaccacagttacagacactcccatacagtcattgtggaccttgctgcaactcaaatttcatttttaatattcatatgccagaacgatttggtaaaaaatgaattttcacctgggagtagtttgtccttccaaaggaatctctattggtagaattcttgagggaggaagaaaaatttgcagtcaaatgtcggcccccaggctctcttcatagtcagtcccccaagttgtacatcttcttagggatagttttacttccttcactacagatgtttgggtagctctgagctgtgacataagttcactatgcctactgataagagtggcaaggggatgaaagtcttcctccaagctgtattctcaaaatggtgtccttagggagccttacagaacaagtcctgtaccacaccagggctgaaaagtcagctgatattttgtcccagtctctttaaatgaccttaatttactaagacaaacgtaccttagaagcatgtaaaatatctataataatatagataatatataatattatagataataaaatatctataataaaatataaagatatattccatgttcacaagtgggaataattaatattgttcaaatgtccatactgtcaaaaataatctacagattcaatgcaatctctatcaaaattctagttacatttttcacagaaataaaaaacgtcctaaaactcatatggtagcccaaaagatcccaaataaccaaagcaatcttgagaagaaagaacaaagccatcggactgcctgatttcaaaatctactaccaagctataacaaccaaaacagcgtgctactggtataagaatagaaacatagaccaagggaacagactagagaacccagaaataaatcaacccatttacggtcaattgattttcaatgaggatgccaagaacacacaatagagaaaggacagcctcttcaataaatagtgctggaaaaactggatattcacatgctgaagaataaaattagactctcatcctatcccatatacaaaattaaactcaaaatgtattaaagacttaaacacaagatatgaaactgtaaaactactagaagaaaacatagggaaaagcttcatgacattgttctgggcaacgatattatggctaaggacagaaaagcacagacaaccaaagcgaaaactggcaaatgagtttacatcaagttaaaataaaaagcttctgcacagcaaaggaaataatcaacagactgaagagacaacctacagaatgggagaaaatatttgcaaaccatgcatctgatacagagttaatatccaaaatatataaggaactcaaacaactcaatagtaagaaagtaagtagccagattaaaaaaatgggcaaagaacccaaatagacatttctcaaaagaatacatacaaatggccagcagacatatgaaaaaatgctcaacattattaatcatgagggaaatactaatttaacaacaaggagatatcaccacatacctgttaaaatgactactatcaaaagacaaaagatgagaattgttggtgaggatgtggagaaaagggaatcctgggacactgttggtgggaatgtaaagacattatgtagtatagtacagagcttcatcagaaaaccaaaactagaactaccatgatccatcaatccttcttctgagtatatacccaaaggaaattaaatcagtatgttgaagagatagcttgtattctcacgttcattgtagcattattcacaatagtcaagatatggagtcaacctaagtatccatcaatgaatgaatgaatgaatgaatgaatgaatacagaaaatgcaatacactgcataaatataaaatagaatattattatcccttttaaaagaagaaaatcctgtcatttgggacaacatgaataagcctggtaataaatttataataatagctaacgtattattgaatatgactattaatttatttaatatttataactccttatttcccccattttgtgggttgtcttttcactttcttatttttttaagattggagagttgccttttatttttaaagatcggtgattcaccttttatttttaatttttggtggtacgtggtaggtatatattaatggggtacatgagatatattaatacaggaatacaatgtgtaataattacatcagggtaaatggtataagtatcacatcaagaatttaccctttctttgtgttacaaacaatccaattttagttattttaaaaggtacaataaattactgttggctgtagtcaccatgttgtgctcttaagtaatagatcttattcattctatctaacaataattttgtacctattaatcatcccctttccccatccccccgatactacccttcccatcctctggtaaccatcatcgtactctctatctccatgagttaaattgtcttaacatttttagcaatgataaataagtgagaacaggcaaagtttgtatttctgtgcctggcttatttcatttaacataatcaccttcagctgtgtccatgttgctgcaaattacaagatctcattcttttccatggctgaatagtactccattgtgtatatgtaccacattttcttcgtccatttgcctgttgatggacacttaggttgcttctaaatcttggctattgtgaatagtgcagcaataaacatgggagtgcagatagctcttcaatatactgatttcctttctttgggtatatacctagcagtggaattgccagatcatatggtagttttttagttttttgaggaacctccaaactgttctccatagtagttgtattaatttaccttcccaccaacagtgtacgagggctccctttcctccacattcttgccagcattcattattgcgtgtattttggataaagctattccaactggggcaagatgatagctcaatgtagtattgatttacatttctctgattatcaatgatgttgagtacattttcctatgcctcttttcataggaaacaggcatagaatatttgtatgtcttcttttgagtaatgtctatttagatcttttgttcatttttaaaccagattattagttttttttctgatcgagttaatatattccagttattaatgacttgtcaggtgggtagcttgtaaatattttctcccattctgtatgttgtcttttcacttcgttaattatttattttgctgtgcagaaggtttttagcttgatattatcctgtttgtccatttttgctttggttccctgtgcttttggggtattactcaagaagtctttgatcattccacatgtcctggagagtgttctcgatgttttcttgtagtagtttcatagtttaaagtttcagatttaagcatgtagtccatcttgatttcattgtggaatatggtaagagataggagtataatctcattcttttgcatatggctatccagttttctcagcatcatttaatgaagagactgtcctttctgcaatgtgtgttcttggagcctttgtcaaaaagaagtcactatggatgtacagatttatttctgggttctctgttatgttccgttggtctgtgtgtctgtttttatgacagtaccatgctgttttgattactatacctctgtaatattatttgaattcaggtaatgtgatgcctttaattttgttatttttgctcagtacgactttggctattcagggattttgtggtttgatataaattttagaattatttgtctatttctgggatgaatgtcattggtattctgatagagattgcattgaatctgtacactattctggatagtatgaacattttgacaatattaattcttccaatctatgaaaatgaaatatcattccattttttggcgtcctcttcaatttcttgcatccacgttttatagttttctctgtagagatttttttttttttagatggaatttcgctcttgtcacccaggctggagtgcagtggtgcaatctcggctcactgcaacctccacctcctgggttgaagcgattctcctgcctcagcctccagagtagctgggactacaggcgcccgccaccacgcctggctaatttttgtattattagtagagacggggtttcactatgttggccaagatgttctcaatctcctgaccttgtgatctgcccgccgcggcctcccaaagtactggaattacaggtgtgagccaccacacccggcccattgtagagatgtttttgcatcttgtggttaagtttattcctaggtattttattttatatgtagctattataaataccattactttcctgatttctttttcagattgtttgctgttggcatatagatatgctaccaattttgtaagtttattttgtatgctgcaacattactgaaaatgtttatcaatcctaatagttttttggtggagtctttaggttttccaaataaagatcataacatctgcaaaaaagggtaatttgacttcttccttttcaattcgtatgtgctttatttctttctcttgcctgattgctttaactagaacttccagtagtatgttgaacaacagtggtgaaaatgggcttccttgtcatgttccagatctaagaggaaaggcttttgtattattattcttgatctttgggagttcgattatttaatgtctctgaggtagtgttcttttggttaaatctgcttgatgttctataaccttcttctacctgaatattgatagctaccataggtttgcaaagctgttattattcctttgaataaacttcataccctaatctttctctctccacttcctctttaagaccaataactcttagatttgcccttttgaggctattttccagatcttgtaggcatatttcataggtttatattattttttcttttgttttctctgactttatattttcaaatagcctgtctccaagttccctaattctttcttcttgttcaattctgctgttaagagattctggatgtcaattgcatttctcagctccagaatttctgctcaattctttttaattatttaatctatttgttaaatttattataggattctgaattccttctctttgttatcttgggtttcgttgagcttcctcaaatagctattttgaattacatgtccgaaaagtcacatatctctgtctctctgggactgatcactggtgccttatttagttcttttggtgaggtcatgcttttctggatggtcttgatgcttgtagatgtttgtcagtgtctgggcattgaagagttaggtatttattgtatctttctcagtctggacttacttgtaccagtattttttgagaaagctttccaggtatttctagtgacttgggtgtggtgatctaaatctatgttaattgcagccatgtctgcttcagggaacacctcaagcccagtagtcctgtggctcttgcagacttatggaggtactgccttggtggtcttggataagatctgggatcatttcttggattaccatgaagagacacttgttctcttcccttacttttccccaaacaaatgtagtctgtttctgcttcctggagcttcctggagctggaagagggatgacacaatcatccccatggctaccacctctggtagtatgctgggtcagacctgaagccagaatagcccaggatctcacccaaagcccgagtgaccactgcctgtctactgactatgttcactcaaggcccaaggactctacaatcagaaggtggcaaatccagccaggcttgtgtccttcccttcagggaagcgagttcccccagccccagatgggtccagatatgctgtcctggagccagagcttagagttgggggccttcggaatctacctgacccggtattctactgcagctgagctggtgcccaagccagaagacaaagtcttttgcactctcccctcccttttcttcaagcagaggagtctgttcctgggccaccactgcctcaggcccaacgcaagtactgcctgattaccactgatgttcacttaaggcccaagagcacttcaattagcttgcagtgaatgctgccagacctcactgtcccccttcaggacagtgggctcccctctggcccagggaaggtccagaaataccatccaggagccaagtcctggaattggtgaccccaggaacccacttggtactctatttcactgtggcccagctggtacccaagctgcaagacacagtctcttttactcttccctcctctttttctcaggcagaaggcatatctcccccaccacagctgggaatgtactgggtcacacctgaatccagcacagctctgagtctcatccaaggtccatggtgaatactgcctggtaccactgttgattattcagggcccaggggccctttagttagcagatgatggattgtgctaggactgggcccttcctttcaaggcagcaggttcccttctggcccagaatttgtttagaaatgtaatcccagagctagaccctggaatggcagcctcagtactctccctggcatcatattctattctggctgagccggtatccaagttgcaagtcaaagccctctttattctcacctctcctctcctcaagcagagggaagtagtctctcctagagctgtgaactgaactgcctggggttaggggaggagtgacacaagtactcccttggcctcgctagctggtgtcccatgaagtcatgttcaccccaagtccactggctccaagcccagcatagcaccaagacttgctcagaaattgcagtccttgtggcctagactgcctttcaagtttatttaagactccagagaactttagcctatgttggaggagcttgctggaatccaggttccaaccactgggatggacgatttgcctctgggtagggctggtcaaaaagctctctccacggttgctggatgagttctgtctttattgttttccactgtgacagagcagcactgagttccaatgcaatgtcccacaggtgctacacttgccctcccccaggcacacagattctctgcaccatgtggaccctgccaggggatgcgggaggagtggtgttggcaattcaagactatctttcctatcttcttcagtgcctctttcagtgacatgcagctaaaaccaggtattgtgatcactcacttgacttttagtccttatgaaggtgctttttgtgtgtagatagccattcaacttgctgttcctatgtgaagggacagtcactggaggcttctatttgcccatcttgctagatctcctctgagctttgcccttcactttcttgatactatactttgaattgtaaaagttttgcttttgatgaagcccaatttatctattttttatttggatgcttgtgcttttggtgtcatagctaagaaatcattgcctagtgcaaggtcacaaacacttatccttatattttcttctaaaaattctgtagatttagctcttacatttagatgtttgatgaattttgagttaatatttgcatatggtatgaagtaaaggtacacattcgtttgcctgagatatttagttgtcctagagccatttgttgaagtcagaatcccccaaaacttaaagctaatagtctactgttgaccagaagccttacagataacaaatattaacagtaaattaacacatattttgtatattatatgtatcatatactttattctttgaaagtaagctagagaaaagaaagcattattaagaaaatttataagaaggagaaaaacatttactagtctttaagtggaagtggattaacataaaggtcttcatcctagccaacttcctgttgagtaggctgaggaggaggaagagggggttgatcttgctgtctcaggggtggcataaatggaagaaaatctgtgtataagtggaaccttgaagttcaaatccatgttgttcaacagtcacatttatatgcttctagctgccatgctctctctctctctgcctgactgttcatcctgtctcctgtgatgtgggaatgaagcattgccctcctgactcgttgtactctccctgtccagaagctgtaagaaaaaaaaaaaaaatctttgaacttacttccttttgtggtggtatattgaatttgtgccttccatctgatgaatcaggggctgccccaggtcaaattttccccagaatgccagagagaacaaaaggtcagtctcccagctccagagtgatggtcatgcaggcataaactggacacgagtcagacaagagccgcaagggcatctgccagtataaacaagtttctcatgtgagggaccccttggttgcatgttgaacaagtaggcattaagtcattcactaggtaaaaaaaaattatcttatgaaaggcacaatataaactctaaagcccagcttctcttcattttccattagggcagggttactagttgctctggtactggaaccctaatttagctggaggctctcaaaacacagtatcacattgtcttggtttctggaaatttgtagtaagttttgaaatcagaatgtgtgagtccttcaaatttgtttttctttctcaagattgttttgggattaaagttcccttacatttctataaaaattttagaatgagcttgtccatttctgcaaaagatggcagcttgataggaattgcatcaaactagtaaattgatatggggagtattgtcatctaatgcatattaagcattccaatccattaacacaggctgtctttctatttctttaggtcttatttttattgtcaatttcactaggctatctaattgtgaacatacattgccaacatcttcctgatggatttaccctttatcattataaaatgttcctttatctttagtaataatttatttttgttaaagtctgttgtctctgatattattatagccattccaactctctctttttatcattttcatggtatatctcctttcatccttttatttttcatcgagtttgtatttttgaatttaacatgagtcttctgtagacatgatacagttggatcacatttttatccattatgtcaatctcttaattgtagagcttaattcatttacatgtaacataactacagatagagaagaacacaattgtgccattttgctacatcttttatatatgccataccatttgttcttagtttcctctattactagaggaaatttgtggtaaatagatattctttagtgtaccattttaattcccttgacacattgtttactatatatttttcagttattttcttggtgtttgccctgggggttaaaaataacaccttaatttagaataatcttattcagattaatactcatttaacttcaatagtatgcaaaagctttgtacctgcagtttcaaactcctacttcctgctgttattgtgacaagttactctttatacactgagttctcataaacataaatttacaattattgctgtgtgcagttgtcttttcaaataactagaaaaagaggatttacaaattaaaaattcatttatactgtcttttatatttacctatgtagttacctctactggtgttcttttttcccacttgtatttgacttactgctctctagtctccttttatgtaagctttaatgattccccttagcatttcttacagggcagatctgttagcaatgaactcttcccagaatctttttttttctatgttgagatgtcttaatttctccttcatttttgaaggatagttttcccagatgtagaattcctgggtgcaagcatttttttttaatttcagcaccttgactatgccatgttaccatcttctggctgatgtgatctccagtgagaaattagctgctaattttattgagtatcccttgtaagtggtgatgagttatttctcttgctgctttcaagattctatctttgcctttgaacagtttggttatgatatgtctaggtgtggatctctttgagtttatccttcttatagttcattgaacttatcggattacagattaatagttttgtataaaatttggtaatttttcagccattattttctcccatacttcttttgccactttgtctctctcattctggaacttccattatacctatgttagtacacttgatggtgtctcacaggtctcagatggccttgctctttttccttcactcatttttctatttctaaaacaggataatttcacttgttgaaactttacaaagcacttgtggacatgcattccccagcctttcttccaaggctttttggttaatctattgtttgccctgattattatgcattgcctcaagcagcaaagactaaaacttttgcctataagtatttttgacaaatgcccccagggtagcaacatgagcagtgggggagttctgagtcagatgaaataaagagagggcttctggttggatcttccagggaaccactagataaaataatgacaattctttgcaaatgaaatctctactccctccagaaccagtgatatgggctgttatatttaaggataactctgagctggttagtgaggaatagtactagggtaaatgaaaataccataaagcttgctgttcttattgagattcagcagtgcattttttgaataagtgcccccatgggttgctgcaagacttggttaactttcagagttacaaaaaagttgactctgataatttttgccagttttttaaattgactttttttggggggcagatttttggagttccttattccagcatttcactgagttcaccttttataccatttttgagcattttctgtgttacagacacagaaatatctgtctttataatgacctcatttcatccttgtaatagcactttaatgtgggtatcattctgttttaatagatagaaatttatgataaaatgctctaaaattgaattatattgatagttgtaaaactcagtaaacaagagaaatcattgaattgtacacttaaaaatgcataagaaaactgaggctcagagacatgagattacacttggaagtagcagaactgtattaatctgttttcacactgccaacaaagacatacccgagactgggcaatttataaagaaaaagaggtttaataaactcacagttccacatggctggggaggcctcacaaccatggcagaaggtgaaaggcacatcttacatggcagtagtcaagagagaatgaaagccaagccaaagggtaaaccccttataaaaccattagatctcatgagaactcactcactaccacaagaacagtatgggggaaacagtccccatcattcaattatctcccaccaggtccttcccacaacatgtgggaattatgggagctaaactgcaagatgaaatttgggtggagacagggccaaaccatatcattccacacctggcccctcccaaatctcatgtctacacatttcaaaaccaatcatgccttcccaacagtcccccaaagtcttaactcatttcaccgttaactcaaaagtccacagtccaaagtcttatctgagacaaggcaagtccctcccgcctatgagcacgtaaaatccaaaccaagttagttacttcctagatacgattaggtaaatacacccattccaaatgagagaaattggccaaaaccaggggtctaaaggccccatacaagtacaaaatccagtggggcagtcaaatcttaaagcttcaaaatgatctcctttgactccgtgtctcaaatccaggtcacactgatgcaagaggtgggttcccatggtcttgggcagctccagccctgtggcattgcagggtacagcctccttcctggctgctttcacgggctggagttgggtgtctgtggcttttccaggcacacatgcaagctgttggtggatctaccattctggggtctagaggacagtggccctcttctcacagctccactaggcaatgtcccagtggggactctgtgtgggggcttcaaccccacatttcccttcctcaatgccctagctgaggttctccatgagcgccctgcccctggagcaagcttctgcctggaaatcgaggcgtttccatacatactctgaaatctaggcagaagttcccaaacctcaattcttgacttctgtgaacctgcaggctcaacaccatgtggaagctgccaaggcttggggcttgcaccctctgaagccatgcaccgagctgtaccttggtgccttttagccataactagagcagctgggatggagggcaccaagtccctaagctgcacacagtggagagctctgagcccaccccaagaaactatttttttcctcctaggccttggggtccatgatgagaggggctgcctcaaaggtctttgacgtgccttggagccattttccccattgtcttagccattaacatttgtctcttggttacttatgcaaatttctgcagccagcttgattttcatgagtttttcttttctattccatgtcaggctgcaaattttctgaacttttattctgtctcccttttaaaactgaatgcttttaacagcccccaagtcacgttttgaatgctttgctgcttagaaatttcttccaccaaataccctaaatcatctctctcaagtttaaagttccacaaatccctaggggagaggcaaaatgccaccagtctctttgctaaaacatagcaagagtggcctttactccagttcccaacaagttcctcatctccatctgaaatcacttcagcctggatttcattgtccacataattattagcattttggtcaaagccattcaacaagtctctaggaagttccaaactttcccaaattttcctgtcttcttctgagccctccaaactgttccaacctctgcctgtttactcagttccaaagctgtttccacatttttgggtatctttacagcagtgctccactctatcagtaccaatttactatattattcattttcacactgctgataaagacgtacccgagactcaggtaatttataaagaaaaaaagagtttaatggacttacatttccacatggtttggggggcctcacaatcatggtggaaggcaaaaagcttgtcttacatggcaataggcaagagagaatgagagccaagtgaaaggggaaaccccttataaaaccatcagctctcatgagacttattcactaccatgagaacagtatgggggaaaccacccccatgattcagttatctcccactggtttcctcccataacatgtgggaattatgggagctacaactcaagatgagatttgggtgaggacacatccaaaccatatcatgaaccataatctaaatccaggtctgtctaagttaaaaaaaaaagtttttctacatcaggtggcctcctatggtggggtcaagctgaaagcttgctaaatcagaataaagaagatatagggaaattgctaccagttgaggctggaagtgagcaccacagatgggcccacattcccacagggaataagcacttccataagttttgttcaagttattatcagatgaaatgtacaatagggaatgcataagtaaggtgcagctgcactaagttgctctgtgttctttccatgtggctattaccctggctttccagggataagtgtactttttataaaattgatctctgtttgtatggaattttctttaaggccaagtataacatctctgacttcacatagaaagatcttgaaagccctagaagatttaaagaagaaagtactttctcagaaaacccttcctgactttcaggccaggacaaaccccttctttataggctgttgagggtctcttaaccttccctttggagcacttgttattataattttacatgtattaatatgactactgattgtttccctcataagacttcaagctccttgagagtaggtaaactgaccctcttttcacctctgtgccagtgtctgacacagagaaggtgctcagcaaatatttgtgaatgaactaacaggaaacttagcttccttcctttatacagtctgaccttgaaattaatctcttttaagaggataaaagattaaaaatatagagcattggtaaaaataaataagatacaatatagtaaaaagagacacagaagaaataatcaaaccattcttataggagtagatccaggtcttgctgtgtctaaatctcatagaatttgaggaacccctctttaagaaaaagagtttctgccaaaatacataattgctaggacccccacccagtcacagacatgggcacaaattaaggtcccttattatccgggcaaaagcagctgtaagattctgccaggaagctcatgcagagtccacagatgaaccccacctggagccaagactcctggctgtgggcttgcctagcatagagggagcatttgatctccagcagccatagaaagggtgtgctgctatcccactaccaagtttccaggcagctggcagtgccaccttctcatcaatatctctgggttccaagtaccctaggttgcctactatgattaacccctgttgtagattgctcaggagagtcttttcgtttcctgctccctagaggcacagagaagaggatacaggccttccttttggagagagagagagataaggtgaaaaggaatattgtaaagactagcagcctccttgagaacagggagtgcaccagagacatcacctctggctatgctggcacagagtatggactcagctaatatctgtggcatcaaagtggacacagtctgacaaaaagagccaccttccagtcttgtttcaatcccagccctccagcctagtaggaagctgcagagttactcagtgtctgcttggcaatcaccaacggttccttccttcttagaccaaagctgcatctctctggattaactgagccacagaatacacaggccttttgctattacttcaaaatagtgtccttttgcagaaatcatgccatcaatccaatggacatgcctccctctgcgaacagtgaggccagggacaaataaatggccagtgcacatcatgaatccctccgtgacagggcagcttggagaaaggaatggagttcagcacatttgtataaaataaaaacggatgggttctgttctgcaacaatctgaatttcagccactctgacatctaaaaatgccttgcccatcttcttcactgtcaaatactttagagcttgggctgcttgtcagggctttttagtgggaatataagcctaaaaggatacactttcaaaagaattcctgcacctttcactaacagcaaggcaaccagatctcctaacttctgcaattcagggcccacctgtagaccagctttatcatgctcagaaaaggaaaagaagaacaagggcaatggccactagcaggagtggagcatccaattgccaagccttgaacttgctccccatttgtcatttctccatttatgtaacaaatatttgctatacccacagtgacaggcgaccctgtgatctctcaggaagagaccatatcttgtttcttttgttgtaaatgatcatgaattcaggatggaaagagatgtggccctggccctcaaggagatcacaagatagcaaggagacagataactaacccaattaaaataaattatgaccagtatggtgataaagataggcacaggtgctatgctaacacatagagaaaacccctagtctccagggatggtgcaaggtttcctgaatgaagtgacatctaagatgatatcatagaagtgaagagcactaagcctgacaaaggcggaagggtgttgcaggttattccatcaggcttaacctgtggttagagtggccccaaaagcagtagcaggggtgtttctgcaagggattgccccaaacagggccagttgggattccaaagaaagaaggactaaatgccacagagatccatccaaagcatttattaagagaatttacatacagagttctgtatgtaaatttgagcagtcctcaaaatggacagtgagcagaaggagaatttccacctaggtagtctgcaacaagggggttgggctatggagtttatgtgaggctttaagtatctagctcagggggaggggctattttttgtttgtagcaatatgtttgattttttagttttttggactgtagcctaaataagtttatcagtgtttgggaatattcaagaacctggcttgtgttcaagcctgcagggaaaaacatgtagctggccaggtagcatagaggtcaagacaatctgtgttccttgatcaggaacacagcagggagtactacggtactctacacagacaaagggaagtacaaggccaaaggcttagagataaataagaacaggacacattgtggggacctaaagaaacttaggctggctaaagaatccaattttgtctgtctggctaatggcaaagaagcaagatatgagactggagaaataggcaggagcctggtaatgaaaccatattaagaagtttgaattactattgcagtaatggagctattgaaaggttacaatcaataaagtagctggttagttttcaattctggaaatccctctctggctatagagtgaaaggttgaaggaggagagactatccatatgaaagatggtttaaatagtccaagagatgatggttgcctgaacttaggtggagacagtaggaatggagaagagtagacagattcaagaggtattttcagagctatattcaatggcacatgtaggaaaagaaacagggctgggtatttccattccccagggcttaagtgagagactggagacagtgtctagaagggaaagcaagtttagatatgagtcaaaaaattgctgctaccaagaggtccaaggaggcaaaagccaggagtaggactccgaagagcaggccatctttctgccagggaagctattgtctgggtaaccattgaggagcaggatctaactgatgggagattgagagggtcaagaactgggtcctcaaggaatagttagctcctgatagctaagaaataggatctaacacaaaatctcaccatgctgctcccatgctatctattccattcaagataatctcaaaaacagaaggaagccagggcccaaagtttatatgcatcagtagcttcagtcatcattgtgtggggtagggattctggaagggctcagttggcagatcctgctccacatggcatcaactgggctcacttggtggtgtcagctgacaggtgggccaatttgcaaaatatgggatggcttcagccacatgtctggtgccccaacttctggggatggttggaagttttccactcgggggggattattgaccagaatgcttacacatggcttcagggtagttggagttcatccacagcatcccagagttcccagagaggtgtctcaagattcagaaaattggtacccatcactgccattgtattctactggtcaaagatcgtgtagatatagattcctcttgatggaaggaatgccagcaactttgcatccatctttaattcaccatgagacctgaaaagacataaggtaggtaaggtgcttagcatagtgtctgacacatagtaagcacacgatacaggaatagaattttttgtagctaatggcaaggttcaagtgaagaaaaccatgaattgtaaggtctttgcatagttctcaagctactgtggctcttcactagttaatatgatccaatccagcgccatattctgctctcaatcccttgagcagtttgataattacatcttctgcatctaagtttattttattttattttattttattttatttatttatttttttgctgagaagaagaaacaaggttgttgtagacagtggagtccatgtgcaaaaattaaaatctgtgtgtcagcgtgtcctcaaaatcagtggacaggagggaagagaagcaaaagcatgcagggcatgccatggcaaaagatttgggctgctgagagcccctgatccacaaagctgccattgcttttggtcccaggatttagtgccagactcacagagatgtcgtgagacagtgagacctcctggcagtggaaaaggtcatgtaccacagaacatgagtaccctcctgaaactaccttcctatccaaatgcctccttgaaaatcccaactcaattgaaaaagaaaaatctgtcagtcctgatatattagaaagacaattcaagcagctgctatttgtattttatttttagacatctttaatttttccttcagactgatcacaatttctataatattatttcttcttctaggtcaaacaacatctgttgtataaaaaaaataaactaattcacattgtcgagtttacaacttccatttttattgtgctgcagcaatatcatgtagttattttatttcccctcagaagaagtcgttatggttgatggtgtcaatcgaccatagattaaagggtccccaaacagactgtggcacattgttgaggcttttagtgtcaataatccttgagtaggctctgatatgattaactacaataactctaaatgatcaattcctgtttattgttaaaatggaactctgcttatgccaaggaatacctttcagaaagttcctttctaccacatttgtgtttcttcctgtcttaggatctccattaaataagaaatctgggtgaagtcacttttgcagcttggtcctaatcatgaggaagggatgttattaaaagaagcaaatgagcaagtttttgactaatgagcaggttactatagctaaaaattactgaagaattaaccccctggcctcctttctgtttggtgcacatgctgtttgcttcttcggcctggaaacctcttccccaccccttcctttagctaatgcctacacattcttcagatctcagctcaactgtcactgtcattttaaatcccctctcccagcagaataggtaatatccccttactctacattcttgccacaccatgtacctttctgctggcgcacttactacagttgcaattttgtttaaatttgtgagatcattcactgaaatgtatacctctcccaccaaactagaagatatgagtagaggcaccatgtctaattcgctcatcattatatccctagcacctggcacaatacttggaatatagtaatcattcaataagtatttgatgagtcatcaagctagctctgttcctgtatctggacaggcagctctagctgctgtggcatacagccccagaatctcagtggattaacacaataaagatttatttctcattcacatcaaaatataacatagattggacagctctcattggaggctattttccatgtgattatctagggatctagatttcttccatctagtgatgctgcagtcttcaacatataacgagccctacttaaaggcaggttctgcaatcacagattcaaccaactgcagacagaaaatattcagaaataaaacaaatgaaaaataacaatacaacagtaaaaaatacaaacagaagaaaacaatacagtataacaactatttacatagcattcacattgtgttaggtattaaaagtaatctcaatatgatttgaagtattggtgaggatatgtgtaggttatatgcaagtactataccattctatatcacagacttgagcacccacgacttttggtatctgcagaggtcctggaactcatccctgtgaatactgagggatagctatatagtgtgcacaatctctaaagaagggaaaaagagaacacggacagtggtataagggattctatagccaggcttagaaatggcacactcttacttgtgctcacactccatccaacccgaccataagcagggttaagaaatgtagtctttctgtgtacccaggaagagaaaacaggattggtgaatatccagtccatcttggccacatgctgttccacagcttaccacattttacaacaatgaataccaatgagaaatcaacaaaccccaaaatattgtgctcactttctctccctactcttataccttaccttagccatccttgattctaatgattccaattagagttgagggctttaaatcaatggtgtcttggttaaatattgtttaagaagcaagtagatacttaaaaaactgaaaaacataaccaacccaggtcagctccctcatcaaaaccctctaatagcttcccatcacttgtcacagacatacaaggttttccatgctttggttcttaatacctttccagaagcaagcaggagatttgtttaaggtaacttgttttatcttgaatattcatgcggctgggtgtggtggctcaaacctgtaatcccagcactttgggaggccaaggcaggtggatcgcctgacgtcaggagttcaagatgagcctgaccaacctggtgaaaccccatctttactaaatatatatatatatatatatatatatatatatatatatatatatataatagcctagcatgatggcacatgactgtaatcccagctacttgggaggctgaggcaggagaatcccttgaacccgggaggccgaagttgcagtgagccaagattgcgccattgcactccagcctggacaacagagtgaaacggtctcatgaataaataaataaacaaacaaacaaacaaataaatattcacgtgaaatttttcattctgctccaaaatatacttatgggtatttaaatttaaactggctccctagacatttctaaacacagtgattgttccaggaagatgtcctgccattattcaggttttagaatgttgtctggcatgagtgcaaaggtttaagcagcacagcccttgaagcccttagaaaaagagtgttaaactgactctactaaaaagagcccagcagagatgctcctgcctcggaccctgtcttagtttgcttgggctgccctgacaaagtaccacaggctgtgtggcttaatcaatagacatttatttcctcatagtcctggaggctggaaatctgagatcaagatgtcagcaaggttggttcctctccaagcttctctccttggcttgcagatggccaccttctccctgtgtcctcacatagcctttcctgtgtgtgtgtctgtgtcctaatctgttcttcttttcaggacatcagttggattggattagggcttacccatatgacctcattttacctctttaaaggcctatctccaaatacagttacaatctgaagcataggaggttaggacttcaatgtatgaatttgaggggcacacgattcagcccctaacaaactcccaaggtaatctgaagaatactgcaagaaaagaaaacttcccctatgaattcattgcaagaaataaatggcccatccctcaacatacatacatatctacccatgttttggcagttttagattcagagcattttgatttagggaatttttgcatctgtctagtggctgtagaggagttttgcgctttgtgacactgttttgtagttggtttttccatggctgctccacatctaaagcaataaaagggatttgaattgcaataatttgccttctctctgtcactcacagtgccctgacttggttgccaagcttttgagaaaaatcacagttatacacacactttctgtgctgatacctgccacccctctatttgctttctgataaatatgccctttccctggaattctactcaaatgccagtctgtgactgactctggtgcctgtctttcccgtgtgttatatgacagcccttcctgcataagaagccctgccccttcagagaaacgtgctcggaactcagtctcctcactcttcccccagccagcactcagctgctgagcagaaatgtgttttgggaatgccagtgtgacaattacacaggtacctaggagaaccaaaagctctggtctcagctgcatgatggcttcagggaaattaagtgcaagctgtttggtgaatatttctccttaggacatcatgaaatcccagaggtggggatgcgtggacagtgcctgcctgtttctttccccctcctcccccaagcttctagaaagaagaaagaaaaaactacagcttagtatttgatattttgaattaattagagccccaaatcccacaccagccagcaggcttcttaatgaggccaatgtattcatcttgttcagggatcattacagtgcctcacaatgccctatgggtttcaaagcactactgcgcgccactgcttcatctgggatccacaatcaccttggtaggtggtcaagacagaagtcatcctttccattcctagatgagctttcagggatgtagagtcactttttcaaggtcacataactaataagcagtagaaactggatttgaactcagctggtctgctaccaggttccatgcagttaaccactgctgttctacactgcctctccagaaagatgcacggctgcctcatgacagagttatttagggatgcagaaaaaaatacagaggttcagtaaaatttgaatttcagataaacaattaatacgtttttttgtataagtatgtcccatagttatgcttatctcacaaatcacatggaaaatacttacatgtactaaacatttatttgatgtttacctgaaatgtaaatttaattggatattctgttttgtatttgctacatcagccaataccatagtcagcactatcctaacaaggctggccaaccacctggcctgaccagctctactccagccatacccatgcctgcctaatgccactttcttttactgaccctggcttgaagcttaccagccatgccttctccatcctcctgacttcacctgcttaatctgtccccaagccccagacagtcagcattagctttggttctctcatctggcccttccttcccactcccctaagcaccactgtgatccagaagcctattacctctcatccagatcatgaccaaagttcttctagttgctgcattcaacagatgactggcagacattttctgaccaaagcgcaggacatttatctattcaaaacttgctaaaggctccctaagtttcttagtgtggcattcaaagctttttggttggggtccaacttgacaatgccacctcctctccccacccctaccacagttgagtgtggattataagcctcagtcacactgaggaccccagtttcccacttttgtttgcttctgtcactccattgaccttgaatctcacctcccttggcatcctcaagtccagtttgacaaccactgcctccaggaaatattttatcctttccactcacacagccataagtgattttgcctctggctcaactctcacagtgcttcctaaccctttttggtacatgccataatatcgttcttttcttgtttttgcctatgtcttagctcttctctccactgtcttacattcctagaggacaagagctatttttgtgttttgtttcttctctaaagggcttagcacagtttctgtcacatgatagatgttccatagaaatgtttggatataagtgaatggcctgatcccagaatcattctctactcaatgacacttactgtatgccaacattggaccaaacatggaattagagtgatcactaggatctgggtcttatcttaaaggcataccataaaagcaaaacaaccttaactggaatgaaactagaccaccctgaaaccaatctaagatcagtgtttctgcaaaagaatcacacacccaactccagaatgatttgaagaataggggaggacttcactcaataacccttgagaaggttggagagtgtatgcagaggtgaggacaaaagtacatcttacaacatgcagcaaaatattctctaagtcctcttccaattctccatcccaaacccactctttgtggtacctacttattccatctatttctctcccttctcccctaatgtcaaaaagcagctctcatttggcctcaatggtgctccatcctcaatccggccctctcctgggattttgtgtggttttgaaatattgctgcctactttctcatattgagccattgagcccttctcttggtttccatggctacatccccaggcactacctgcacaacagagtacctagagaggccaaggaaaaaaaaataatttcttcccaccataaattgatgagacactctgtgagggccttcgaaaggtacagggaaaaaaaaggcccagaaagaagaaaagcaaagaatgggaaggaagacctgaggagggggccggaagcctgtactgctccttcatctttgatgacattttctcttccaagtcctccttgcaacttgtagtatgctgtctctaaagtggcctctatgatgacacccaatggccccatctcttggtatcaatgccctgtgtcattctctcctcttaggcttgggctggacctaatgactcacttaaaacaaaaccaaagatggcagaagtgatgggatatgacgtctgagattaggttattaaaaaactccagtttccgagggctcatttctgttccatttgtctatatctctgttttgttaccagtaccatgctgttttggttactatagccttgtattatagtttgaagtcaggtagcatgatgcctccagctttgctcttttggcttaggattgtcttggcaatgcgggctcttttttggttccatatgaactttaaagtagtttttttccaattctgtgaagaaagtcattggtagcttgatggggatggcattaaatctataaactaccttgggcagtatggccattttcatgatattgattcttcctatccacgagcatggaatgttcttccatttgtttgtgtcctcttttatttcattcagcagtggtttggagttctccttgaagaggtccttcacatcccttgtaagttggatcctagctattttaatctctttgaagcaattgtgaatgggagttcactcatgatttggctctgttttatctgttattggtgtataggaatgcttgtgatttttgcacattgattttgtatcctgagactttgctgaagttgctttcagcttaaggagattttggactgagatgatggggttttctaaatattcaatcatgtcatctgcaaagaaggacaatttgactttctcttttcctaattgaataccctttatttatttctcctgcctgattgccctggccagaacttccaacactatgttgaataggagtgctgagagagggcatccctgtcttgtgccagttttcaaagggaatgcttccagtttttgcccattcagtatgatattgactgtgggtttgtcataaatagctcttattattttgagatatgtcccatcaatacctaatttattgagagttttcagggcttttggggaaaggattccctatttaataaatggtgctgggaaaactggctagccatatgtagaaagctgaaactggatcccttccttacaccttatacaaaaattaattcaagatggattaaagacttaaatgttagacctaaaaccataaaaaaccctagaagaaaacctaggcaataccattcaggacataggcatgggcaaggacttcatgtctgaaacaccaaaagcaatggcaacaaaagccaaaattgacaaatgggatataattaaactaaagagcttccgcacagcaaaagaaactaccatcagagtgaacaggcaacctacagaataggagaaaatttttgcaatctactcatctgacaaagcgctaatatctagaatctacaaagaactcaaacaaatttacaagaaaaagacaaacaaccccatcaaaaagtaggcaaaggatatgagcagacacttctcaaaagaagacatttatgcagccaaaaaacacatgaaaaaatgctcaccatcaccggccatcagagaaatgcaaatcaaaaccacaatgagataccatctcacacccattagaatgatgatcattaaaaagtcaggaaacaacaggtgctggagaggttgtggagaaataggaacacttttatactgttggtgggactgtaaactgattcaaccattgtggaagacagtgtggtgattcctcaaggatctagaactagacataccatttgacccagccatcccattactgggtatatacccaaaggattacaaatcatgttgctataaagacacatgcacacgtatgtttattgcggcactattcacaatagcaaagacttggaaccaacccaaatgtccatcaatgatagactggattaagaaaatgtggcacatacacaccatggaatactatgtagccattaaaaatgatgagttcatgtcctttgtagggacatggatgaagctggaaaccatcattctcagcaaactatcgcagggacaaaaaaccaaacaccacatgttctcactcataggtgggaattgaacaatgagaacacttggacacagggttgggaacatcacacaccggggcctgtcgtggggtcgggggaggggggagggatagcattaggagatgtacctaatgtaaacgacgagttaatgggtgtagcacaccaacatggtacatgtatacatatgtaacaaatctgcgcgttgtgcacatgtaccctataataaaaaaaaaaaacaggcaaagaataaaaaacaaaaaacaaacaaaaaaaaccctccagtttccatcttagtgtctttgtcttgcttgtactctcttgttctctcttagattgctccttctaggtgaatccagctgccatgccatcatttggaggggtccatgtgcatgagcttggacccatttccccacagttgacccttgagatgactgcagctccaactgccatcatactgcatgacataccttgagctagtggcctccagctaagctgcacccagatttctgacccatacaaactgtgagataataattgttggttgttttaagccactaagttttggggcgattttgtttgttacgcagcaatagataactaatacacagctgaaatttccacatgcttcactgtgactcaagcacacccaccctacttcatgtccaaatgtcattttataatgctgcagttgaaatgataaagccggtggtctccagagacacttgtagggcttttatagctgttacaaattctgcttcatgaatcccagacccatatgcaaatgtgaagctcaacctttgataagccatttgatttcccttttagctaatgaagtgaaaatacaccattttacactaagattaaattgcgaaaatgtttcactcttgtccccagttagttgtaattaaaaatagaaatggaagaacagaaaaagtcactgactctcttctggcatactgagcaacggaaagggaaactgtgatcctctgcaacttctaagtggaggtaaaagggtgggcatgggggagcagggtgagagcgcaggcctgcccaaactggcaaagggtgtgcagtcatcccccagcagctcagaatgccagaagaaatatttccccatgctttctggggaggaggaagggagggagagcattcctatttctcaatgtctgcttaacacagagcatcttaacttggggctcacaaatacttagtaggacatgattgagttttatagggtctggaaattgctgacacatagtaagaactcaaacgtgtaaaaaagagaaatgtgtgtgtgtgtgtgtgtgtgtgtgtgtatgtatgggtgagggaggtgtttaggtatctgtgtggctgagacagagagtgagtgagggagtgtatatgcacctctgtgtaggtgtgttgtgtatagggatctatgtgtgagagataaaataggtgagaagcatatatataaacgtgtgtgtgtttaggtacccacatgtacgagagacagcatgagtgaggaagcatctatgagactatatgtctctgtgtgagggtatttgtgtaagtataccaatactagggttatctatgtatgagctagggtgtatctatgtatgtgtgggtgtgaaagtatgggtgagtggtggacacgtatgaatgtgcattattgacatgagagaaaagtggctctctgattctgtaatgcttaagaattccctgggcatcttgttaggaaggtaggtcctcagtccctacctcctaagattctaattcagtaatctggggaggggcccagaaatctgtaagtttttatcctgatggttctcaggcaggtaggtccagagagaaacactaaacccagagacccagagtgaaaaggaactgtaaaagtcatcattccacagatgagtaaactaggtctggaggaggaaagtggcttgctgcaggccacacaactaacaaatgaaagccacgactcaaaccctggcttcctgtctaccagctcagtattcattcagctacagcaatatttctccaatgggaagagacttggggagagagtcacatgagggctttattcaatgtcccccgtcccatatagtggcccttgagaatccttgtcatagtgaacatttgtttgtgttaattatatgccaggagggtgttggggaagaaaccagggcttgatatcatatcacatccctgctaggactactgtattaaacagcaaaggcaaagcacaaccctgtaaagtgagccctgtgtaaggggacatcctagctggaagtccaaaatattctacgcaacgagcagctgggatgagggggcagataccctcttggcaataattgggctcatggatgattctgtcttcagagaaactgggcgtagccaatggcatttcataggagagacccttcaaagacatacttacaaaagagccgagtgctatttttaattcaaccatcatgccatctaacaacctctctcattaccctctacctcacccattcatctcagatgctgaacattgtcggatgctttttaaaaatctaagcacactgtagcccctgagtttcctttatctgccatgacagcagtgtcttcaaagaacttccgcaggttattttaaaatgacctcctctagcttggagcttagtttcccagagagctttcacttcagtgctggatgtgagagagggaggaccaggaaggctgattcggcagccctgctgaggcaacagtgagcactggcagagaactgtgtgtggggcccaaagagttagtggtagttgtgaggggaggctctgcctctttcatgagctgatgtcaactccttaactcctggtgtcttcatctctgcaacagcttagccaagggaaggatggagacacttcacccctatcctgaccatttcatttaccatggtgctgtagacacacgggggccactagcatgccagcagccaccacagacaataactcaacaaagagattggctaggccacaatcccacaatccattgttctgtgctctttccatcctggtcatgaggcaggaggctaataaacagccaagcaatacagggctgagtcaaacaaagatgatgaggacacttgaagtctcctttgtagctcaataaaggttgagccagtggtggaaagcatcttcagggaagcccatgcttgccacctgaagcatagagctgttgattccgcctgggattttcccattattcactgtgtttcatgtagggattagctgaaacctgatttcctgggctctcaggctttcactgcttaggtccttcctgtggagtctcacagccttttccctgagcctttcaaagacctacacctctgtgcctctatatcactaatgctgtacacttctcagtcaggatatagctctggaagacagggcttccatgtcatgcatgcaccttgcccaagaccgctcaaattatgcatgtttggaaatatgtgtatctctgttgctgggcaaaaattggatgctcagagcctccctccactgtaggctaggatgtgttacctctgttggtggccacatactgccctgtgacatgggaaatgcagggaagcgagcaggatatcacctctctaggcccccacatgtcccaggcacaggcataagatctcagtcctcacaaagatcctgtgatttatccttcaattacatttgaagaaattgaggcccagaaatatttggtaattttccagtatagctagtaaattggcagagctggattgtaactcagattatcatgaggattaaatgagctggtgcaggtaaaaccacagacctccaaacagtgctaaacgggagctcttctcaccctcctctcatgcagcagttcagttgtagcaccagcataaggaattgcccatctctgggcctgggtttctgcaaagtgtgtttctctgaatactgtggaaagaagaaagcaacaaggagagggagtgaaagccacctctaaaaccacgaggctttcctttccccttcaagcagcagttcttagactgggggcagtggagagggttcaagagagctgcagaccctcccaaacaacattgtgtgcatgtgcctgggtggattttccgggagaaggtggtcatagcttcaattcagggccaacacccaaaagaaactattaaaggtaaatcctttgagagggaacccaacatccattgggcatttattccaagctcaagtttcctaattactgtaaaaggctaaagtgatttttaaaagctgtacttaagaatttgaagcaccatttgtatgtagactaagtcaatcaagagaggccttggaatcagataaactggaattcaattgcagctctgccatttgctggctgtataaacctggcccagttacttcagtgaacctccctgagcttcactgagttgacacgtagtagacatatcaactgaggaaaagtattactacaacctggcacatggtaggcattggttaaatgctgttgtcctttcttttcttctacatctaaatgcaaagtaaagttttaattattcctcagagttggcagaatctcaactctgaaatagttattattgctattgctgttgttagctaacaattatggagtgcttactatatgccaggcactgtctttaatgatgttcatatatttactcatgagacttattcactaccacaagaaaagtataggggaaactgccccccattattcaattttctcccactggctccctcccacaacacatgggaattatgggagctacaattcaagatgagattttggtggggacacggccaaaccatatcagaagtgctcataaacctgggctttcctcaatcttgtgggaggagcctgaactcatctctaaccccaggaccctaggctctggcaagggcttcaggtttatggctagactattgttaccatgacactcccactgcaggctggactcaaccttatcttctggactcaggaagccagacacatattaattcctgccattaaaatctccactcatttatgcatgcatacattcattcataaataaatgcattatttatttacttgacatttctttcccttttcgcatcactaccctccccccttctttcacctcctttcacttctgtctcattctccataacacatgtcaacaacctcaatgatatctttcaatattttctatatgctcaaatacatttggggcagttgatcattgttttagaaatctgagatcacaatgtatacaatttctgcacattactttcctcactcagaaatctctcccagaaatctttctaggtaaactggtaaagctctagctcggttttttttttttttcatggatgcagtcaaattcatcatccaacttaactttcagccatacgtaagggttggcagttccctgaataccccagactgtatcccatctctatgcctttgcccatcctgctccctggacctggcaagtacatttccctattgacctgaaggatacttcctcatctgtaaagactcagctcatagcaaatctttcctgccaacaaatgacctggcagaagtgaccctgctctcctttgtgtcctcaaggtgccctgaacagacttctatccgagaatgtctaaaatgttaagtgatatattgatatctgtttcccccaacaagactctaagttcaggaaaataagatttgtctgttttgctcactgctggaatactgtaggtacccaataaatattctgaggccaggtgtggtggttcatgcctgtaatcctagcactttcagaggccgaggtgggaggatcccttgagctcagcagtttcaggccagcctgggcaacatggggaaaccctgtctctacagaaaatacaaaaaaaaaaaaaaaatggccaggcgcggtgtctcatgcctgtaatcccaacactttgggaggctgaggcgggcagatcacctgaggtcaggagttcgagacaagcctggacaatatagtgcaacccgatctctactaaaaatacaaaaattagccagccgtggtggcatgcccctgtagtctcagctactcaggagactgaggcagaagaatcacttgaatccaggagacagaggttgcagtgagctgagatggagccactgcactccaacctggacaacacagcgagactccatctcaaaataaataaataaataaataaataaataaatagacaatacaaaaaaaaaatagccaggtgtggtggtgtgcacctgtagcccagctacctggggaactgaggcaggaggatcatttgagccagggagattgaggctacagtcagccaagattgtattactgcactccagtctgggcaacagactgagactccgtctcaaaaaaaaattagacgtgatgggtggatgaatgaataaatgaatgaggataacgaaagcctgagccaaaggaccagcagtggaagaggagtgacactggtgcacttcagagctatttatgaggtagaactgccaagacttggcaattagcttaagggagtgtttcttatttccacaagaacataataagcactatgaaaggtcatgtttgtcttgttcgtggtttcctccccattgcctagattgaatagtgcccagtgcatagttggtgctaaataaacatttataaaataaattaatcgcactggattcagggatctccagcctgggccttttccctgacccagaggaatagacccttcagcaacccaaacgtctcaccttgccggctctcaaagacttctgctctctgcttgctctcctgtactatccaaatcatgatgcaagatccttctcccttggaatctttctgaagtcctcacctcagctagtctcagttatttccagcccaagcctgtgctgatgaatgactatgtgtttgtgtgtgtgtgcgtgtgcccatgtgcgtatgtgcagctgtgtgcgtgcaaatggtgtgggtgagtgtgaagtaagattcccagtggggaggctcagaatatttctaccacagaaagagggagcagagctcaggggttattcttggcagcagcagagaaaactgatattcctgtgctgaggtgagagtgctgcctcactctcctgttggcaccaggtcagaatccagggtatggagagaagcctttagctccaagaaaactcaggaggtagacctaactgtgagatatttaccctgagttgcctttaggaaccctggagtccaggtacaggtatataaaggaagagaagcccaatcttcaagccaaatccctaggaaggcttcatcaaaagaggatctccccccatgctcctagccccatctacaagaggggtctccaaaggctgaacattgcttgtgggtagcaaggaatagagtagtgaagagtgattccttcttgggacaatggccacactcccctatagtttctgccataaatcaaatttagaggcccaaggaattcatcacactacaacaaagcaatagcctaaacaaacgcactgatgatgacgagtacagaaatttccacaggctagtaaggagctctgatatgtgtcttgagggtacataaagaacagactgaactggatggtaggtcccagaccatggtgttccttgaaggtctttttgaaaggtttgggctttatcctgaaggcagtttgaggagtagggggtgtaatccatgaaagagtttaggcagggaggtgacataatcagcttttgatctgcagtcactttggtggcaatgtggaaaacagactggatggaagcaagatttaggtacagaggaacaaagaagagattgcgaaggtttcactggcaccatatatatggagggaacctgggaaaagtggatcatcaagagatgcttaagggatagacttaatagaaccaggacagtggcaagggaatgtagagcaggactagatttcaaacagatgatgggaaatcgtggaagatgggtcggagttgaaggaagatttgaaggaaagaggcaagagttgagtcagaggtgactcaagctttacaaagagccaggaacagaaaagataaacaaaaggtcctcagggaagtgttggtgtggttggagggctttggggacaacaggagtgcagaagcctgtcttgaccagttaaactgggggtctcagctgtcagcctagtgtaaatgcccagcaggcagttgggaagagaggtcagcactggaaagagcaacctgaatttgacagcatgagatgactcagcccacaagccgggccagtgctatgtcactgatccagaacacaggctcagacaaattggacaatcctagcctgcaacttggcacaaggcacatgccatgctgcctcccagcaacaggttctcacaatctaaaatccacctcctatatgtatggcttgaaggagatgcatttaacttagatttggaatataaaatgtgtatacaaccatttattccattagtacatttactttccacctcagaactaaatgcctctactaattaaatacatttattttaacttcagaagcatttatttccaaaataaggacacgttaattatctgcaaagtgaaattaaccccaggatgctaatctatatattcatctgcctggatatgtgttacccatggatgcctggttgtgctgccaaccgttgcacaacactgttcaacgcactcttaccacctgcatccccatccttcttgttatcatcttactgagaactgcatggttgatgtggaatgtgtaatttaaatgttaccacactcattccaaacctaagaagactacagatacaggattcacaagcaggttctgatataattcaagggcatttttaccgggagaggaggtaactatctccaactaccctgaggagatttttgctcatgttttatgagaactgacaccttaattctcttgtcactgacatttcctagacatgggtacatatctgtaattctcatgataagtcattagtattaattaagccacatcaatagcataatttagctagtcagtcaacattttctgagagctctcagtgggggtagtcctaactcagagcattggagagttaataagggaaaagaaaatgcaagaatagaaagagttttccagaaagatgggcattcttgccttcacagccactggggagtcacttgcagaaacttcaagaaggagtgaggtcttcttttatgatataacatctgtttttctcatctgcacaacggagcagaaataccttgcaacagtctgccatcaaggggaggagcttcagagagagtaggcttcaatgcccccagggaaagacaaatggaatgcaattggttccagcaggaatttggcaactctgtcgaccaaattctggcctttggtctaccaagtctgatcagtcagaagtgaaaaagtaagagagccctctcagttaacagaatgtcttctctcttccttcctttacattcctctctctccctgcctccttccctttctcattccttttatcccatcctttctttcttccagaatattttttgagcacatactatgagcatttactatttacttagacactatgctaagcagtggagggacaacagtgaacaaataaaagttccttcttctaagcagctaggattctagtgaggggagagaatcataagtaaacaaatgaacaagccaaacaatatgtcagctagtgagaagtgttataaaaaaaaatgagaatacaggaacagaagtgatgagagtggatggcattttaacttcagttagttccctgtgcagcatagacatagtagaagtcagcaggaaggagaatattcctactcttggatacccagactcatgaggcatgcatgcagtgttagtagcagttgaaataaatgttgcatttttaaagtgctagcttggtgctactggaactacatattttatacatgcaaatggctttcctagccaagtaccatgtgctcatgcctacaaaaaagacaaaggccattaccacctcctttttcccttgggctagcaccaacttgactccccaaaggaaggctcaagagctttaatctggagattccctgacttctgatgagtggtaggacacataaaaaggaaatgcaagtcagaagttatgcttctgcttccatgaatgagacgtgggttgggctcaaggtgaataagaggctagaactgaatggtttgagagtggtccagaagatggcattgtctaacatcagggttaactgtggctacattgaagaattccaaattagggatttaaaccccaagtcctctggtcccctatgcatccttgattgtagtatgtagaagaacatggatgtgcataggccattttacacataaattttttaaatacactaaagtacactaatgtgttatacaccaagttcaagatgcttgaactttgctttgcttggcagttggtagttctaagaactagactcaagatgtgggcattatcaaatagccccaataaaggaggacagaggaaagactgccttcatatgcccgtggatgtctaccaacttgaaaggatatatcatgctattgaggttcctgtcccttcttagtgaccagagaaaatggtaatttaagatggaattatctagaagacttagcctatgtagatgactattatatatcaatctgtgcatttgttttggtccatctcctcccaggttgatggatgcagcaaaccaccatggcacgtgtatacctatgtaagaaaactgcacgttctgcacatgtatcccagaacttaaagcataattaaatgaataataaaacttgctatgctataacttgacaaagcaaaagactggaaaaaaaagggtggtttttcaaatgggatattttagccctgagataaaaaagaaacaagccagaagtattaataaaaggaacaacagaagctgctatgagtaaaaacagagcataggattgatcattacttaattcaacaagcatatgttttccactcacatcacagttcaaatggatttttgccaaccagtctttcacttggtgccttgggatcctggcttctcaaaaaaaaaaaaaaaaagaagaagaagaagaagaaaaagaacgaaaaagaatggatgcttcatgataatttcatgtactgctgcagcattagcgcctaaataatgtctggctcagagtagatactcaacaaatatttgttgcatgaatgaatgacataactgcttgcaacacatctttgggagagcacaagctgcagccccttaaggtactgggctgcctagagagggctatttgttttcttatgattcacttttgagagttctctgtataaatctaaatataagtctttgtcagatatttgctttgcaaatattttctgtgccttgtctttttattatttcatcagcgtcctgtaaaggagatgaatttttttattttgtccagtttatcatttggttcttttatggattgtgcttttggtgtcatatctaagaaatctttgcctaacccaaagtcacagattttcttctaaaagttttacagttttaggttttacatttaggtctgtgttctatttcagattaatttctgattacagtgaggtagtggtcaaggttctttttttgcatttgaatactcaattgttccagcatcatttattggaaagattattcttccagctccattcatgtccctgcaaaggaaatgttctcattccttgttacagctgcatagtattccatggtgtgcatgtactacattttcttcatcaaatctgtcactgatgggcatttgagttgattctttctccacaaacacagcaatatttgcaatagcacattactgtaaacaatgtaaatattcatcaataggggaccagttaaataaattccagtatatttatccagtagaaatccacggcaccattaaaaagaatgtaatagctctatacatacttattttgagcaatatttatgccctgttaagtagacgtaacattttaaattgaaataaaattaattttcatatattttcctgttaaccacatgttcacatcttttcatccgataaatattcattgagatgtccttgtgtgcaggcactgttctaggcactgaggatacagcagtgatatctagtgggagaaagcagacaataaacaaataactagtgtgatggttaattgtatgtgtcaacttggctgagctaagtgatgctcagaaagctgctaaaacattatttctggatgtgtctgtgagggcgtttccagaagaaattggcatttgagtcagtagactgagtaaagaagatccaacctgaccaatgtgagtggccatcatctaatccattgagggcacaaatggaacaaaaacgtcaaagaaggtaaaattctctctttcttatcttgatctgggacatctgtcttctcctgtcctgggactttggtgctcctggttctcagatctttggactcagatcaggacttacaccattgactcccctggttctcagggcttctggtttggactggaaccacaccactggctttcctgggtctccagcttgtagatggcagatcatggtccttctcagactacacgatagtgtgagacaatccttcatcctgaatctctttctatatagctatatatctcttattgattctgtctctctggagacctctgatgaacacaagtagctacacacaaaatctgatcatgataagtgccatggagagaaataaaacagggtaagaaagatgtggagtgtgggattgaagcgttacaattttaatagggtggacatggacagttttaccaagaaggtgacatttgagtaaagacttaaaggaggtgaaaatgtgagtcacacagacatcttggagacaagcactacatggtgaggaaaagcaaggcccccaaagcaagagctgttggaggaatttcaaggaggccagcgtggctggaacagagtgagcaagtggaatggagtggcagggaatgagtgagggagacaacagctcagtaggaccttgtgggctactggaaagactttggctttgactctcagtgagataaggaggtatttgaaggagttttagcagagaaggaacaattctgtttatttttaggagctctttatatatttaggaaattacttctttgttagtcatatattttggaatttgttgttccccgtttgtcatttctgtttctacattttgcttataatatttgtctatgtaaaccttaatatgtacttggttaaattgataaattctttgcataattaatagctagctattgttggcctacctataattaatttttgctttatctagtaataggcctgaattttcatttgggatccagccctctccctgacactatgcagggcctgggagactaaagcctgctggaaataactccagcttggccctgccaaacattacaacacctagcacctgctctccccaccatagtgactgatttgggcaggaatgagaccacagccactccaagagcccagctgttggctaccagtaacatcttctcctctaaacaggagatccagctatattgaaggcttccaaaattaccctatgtctacctgtcacaggaatgttcagaggactaagcctctgcctttctccaccccatacttacttcatatggaactatgaatgggcaacttcacaatttattatttacgtcacctagatgcaagtcagagggagaagcaacaaatcagcagtacctaagaagttctcaagtcctcaaggtgaactttacctatatatacaaaatatatttgcctctttcctttaaccctttttcttactcccaccactttccacccaatgtgtaataatattagtcacttcatagagttcttatgagaagttaaatgaggaaatcatgtaaaccactgagggctggcaacaagttcttaataagtgctattgagttatgagtattattatctcccttgggctggattcacagtgtcacctcttctgggaccatagtaagccaatggttccagctccttctattatgtcattttaatttggggaatagcttaacatattagatgatcctttacatgcctgagcggtctttctttgatggtatttctatgatcttatgaagagctagatgttgccgctccattttatcttgctggtggcagctggtgtttagccaacttgtctttttttttctgtctttatatttttggttttgttttttggcagaagcctgtgtttttcagattactttttgcttgtgtctactttttcccaaaacaatattacatattaaacttattgtatatttaagtttattttatgcatcaaaagtcgcattgaatttctgtgctattgtggggcaaattgacatcaatgtaatttaactcattttatcccaaattaggctatgtctttccatatactcaaatcttcttttatgtccctcaacagtttccttcatataaatattgcatatttctaattaagtttatttttctaatctccattttggatgtcttaaatatagtcttttctccctttgctctttatcaaagatctgcaaactatggcctgtttttgtaaataaagttttgtaataaagtttaaatggccactcccatttgtttacatgttgagtatggctgctttcagactgaaatggcgaatgaagtggtcataacaagaccatatggcctggaaagcaaatatatttattatctggcaatttacaaaaaaagtttgccaacctctgctttatatttttgatctagttgttatttgaaaataaagctattgatatttgtatattaattttttacccagctaccttattgtttttattacttaatagtttacagtatttcttttagtttttccaggtgtaacatctgtaaatattaataaatctattagctaatatttcatttagcatttttatatctatactcacatgagaagttttctttaattttcttttgtgtttatcaacctgtgttcactcaggaaaatgaagccacttaagtataccaggagtggagggtttcatatagaaatgagggcttatttgaattttgggaaagctgatgaaacaggtcagcagagttactgcagaagaccaggaaagttacatctggaaggttagggaagcagacactaaagacttaagcctgaagcatagaagtaaggatccgtcaatacttattgagaaacttctggaattctcaagaacctctgagaaatctcccattctgtggcaataaagtggtggtactcaagccatcaccaacatggctcatatgtctcattgcactatgtccaaagacaaatggcctctgcttctcttctgtctcctaaatctcttaagatttcctcttatttgtttaagtctaacccagaagacttacatggcaggtaattctgggaaatgtattcccttgtttctccaaaggggtggggataataccaagttgacaacagaaaatctagcaccctttttaaggttttggcatcagtgatttcttggtgctctaaatagttcttatgattattccatgggtgcttaaaaagaatatgtattctctgatttaagaatatgtaattgatttaactattgattagatattaataaaatagatttttaaattaccttattaatttggttaagtcctccatgactacttattttttgactatttgttatggaaaggtgtagctaaataaatatagaactactctatatgtgtttctagttctctatgtattctctacattttgctttataattgttttctttcttagagacaggggtcttgctgtgttgcccaggccagagtgcagtggcatgatcataactcactgtagccttaaactcctgggctcaagcaatcctcctgcctcagcttctcaagtagatgggactacagaagtgcatcaccacaccctgctaatttttttcttatttttatttttagtgatggagtcatgctatgatgctcagagtggtcttgagctcctggcctcaagcaatcctcccacctcagccccctgagtagctgggattataggtgagaggcaccatgcctggatttgctttataaattttgatatgttacttggtgcatagatattcattgctgttagaccttcattatgtgttgtaccctgcccttctttggttcacttttccttgaattcagtcttgtctgatattaattttcagctgtctgctttcttcttatttccatttttctaatatgcttttgcctactcatttgctttcaattttttctgagtcatttcattctagatgagtatattacagtcagtacttaattgggtttttctttgtcactgaatatgagtgtctcttttcctgtgtattgatagggtagatatgtgtagtatgagtgttacaattttttaaaaaactttgatttctctcctttgttttatttggggtctccggttattttttaaggtgtatagtgtcattttatttttaatgtttgcctctgtaaaaataattttataggctgtacttaatcttctatttatttagctagtttatattgactcttcaataacagtagtaaatgtccctacttctaactccccttgccctccaccttttaattttgtggggtatactactggccttagtttttctagtggttaattttatacatttaaataggtttataccttttaaacttcaatggccacctttaaaaatattttgaccccacccactataaaaaataaacatgccatcttacacgcacaatctcactttctctccccttacattccctaatttttactgggtattttaatatttcttcatcatcgtggttgattacatttacatgtatattgcagtggtagttcccataattgttataacctttaaccatagttctacatttatttttgccaccgtttttcccattcaccttttggttcaactttatcttctagtagtgtcttcaaaaaagtgttcttggaaactacagcccatgaaacattattgcatatttgaaaatatttatctgtcaccattacacctgaatgacaatttagctagctcaaatttactggctcacatcatcttttttttggtaattttttaagtacttctctactgtcatgtaatgttgtatgtaggatagcctaaagccaacttgtgtttttttattttgctgttatagtagtttgatcatttttgcctagatgccccataggattatttttctttgtctttatttcaggaaaccttactagactatggttcagtgctgactagacatttttttccttaagaaacaccatgccctttagatccttagattcaaatcttttttaatatcagtaaagtttttaaatttacatatttggatattttatacttctctagtttttcttcttaaagaagaaaacattaattctgtctttgcctgtcttccatatctacaattttcttctaatcactttttataatttccatttcattttgctcaattgcctcaaagctgctatctatttttctgttgtcaacaatctgtactcttacatcagctactatgataatattgtgtcaccatttactactatttacaagctaaccataatttctctgatgattttagttttctcttctactttgtgtcctagatacaggcagctcaattttaatttttgttgcttttcttgattccttatacctctgcattaagctcttaattcacaaattacttccattgttaagttattgagttcttaaacaaatatttggtcatgattttcatctactccacatcaaaatgttcatactgtgtaggctgtttgccttttttgtcctgctattttccaccattttgtgacatttttgtatggatctccttgttcgttttttattattagtcatccttgagtgagcagaaatcttcctagagcaggtatttgaaagaagtagtgtggaagaggggctggggctgtgttctgcgttagtagaaaatcccctaattcttagaaaaatcctttatgattcatggtcttgtgggagaaggttgtgaagcgggttttgtgaatgtgcttcatgtgcaatagagagtgactgagaggtggtttaacctttcttcttagctcacaaagaatggctgctacagagctgcttaacacccacagtttttcttctacatgctgcacatttacaaagatggagtatccgtgagttttctcactcattcctacctcccctgccattttaaagtatccaaggaagttggggagattccctcagctaaacagccacccagatcttattgttccaaacaaaaaattattagatttgccctctgagcaggtcacctactttggagaattttgtgctctgccagctctcctcaagatttggaaaagcagttattttctattggagcccccatcactccagtccaaagttcactgcatgtgacatcccatcttatttgtctggttcctgattataggagtttcccagtttcaacaaaaatactgtctttgtttttgtttctcattcatttttccccaattttgtttcaaagcgaaaagtaaaaacattcttactctaacatcttaaaattaatgtctgggaggaacctaaactgctcattaatatatgccatgctatatgtgatatggcagagactgctacctgtccaccagaatctatttatttttcttggatgcacaataagactacatttcctagtctcccttgcaattacatgtgaccatgtcattaagatttagtggatgaaatttaagcagaagcaaggtgtgtaaattctagggctggcccattacaaactttaacatgggcacctgtgtgtttttccttttctgcttaattgggttggagataatcacagtgatgctgaaagccatgtgctaaagaaggcagagcctccttctgcttgggctcctgaatgactgtgtggaacagaggcccttgccactcttgggccattctggattattacatgcacaaagagtaaagttcttttctgttaagccattagatgtatgggtttatttgctgttacagcctagtcgaacccaaatgatgtagtgagggaggcaggacaaggaagaaacctattcagtatggagttatccttagggacaagttacaaaaattataaggatcagacaccactgctggttgatccattatagaccagaataagcaggtggtatgattccagaaggagatgccatggttgtgtgagagagagattaaccattcctataaacagaagggtcaaagaaagtagccagtcaccagaatgcttatattaaggaggattgtgactacctgtatataaagtataggaagaaaatggggcagggcaattaagatgaattgcagacacaactatttgtgcatattaatttgaatttaaatttaaacttaatttaaggataatttaaaggaaaatcttcccttacctatttcatgctgaaggggtctttcaagttgtcaaactctctctatataaataagactgcataatccagaccctccggaatccagagatgaattgcatgtggtagctgatgtgtgggaagcccacagagcagcacttctggtcattgccatccagctagctggtgctctcagaagaatgagatgaagaggcatgactttcaagcttcctctgccatacaaggtgagtttgggttccaggcttcttcctagcccctgtttctgcttcctctgatttaatacccagtcactgagtacctactaaacactcggcattaaactgaaaagaacagggaagtcaaaaaccttttaccaatgcctgatgggataaagacatgacccatccctcaaagagcttgtggtcttcccatggcaatgcccttcctccctaggccagatggactgtgaagaacagcagtctcaagtggatttattgggaagctcatgaagactcagctcaatgggccatgtttgcaggggccccttacaaggctctgcacttgattttgtaattttgaattatttttctcaaaaaggcctcccaaattatgtaagcttcaggcctttaaaacttggatctgttcccttgaagccacataatctgatcagaaataattttcagggctcattgggtgctggagaattcatggttagatatttaaataaaaatgcagagaatctataggactttccaactgagaccaaggctttttttttctggtagcttgactgccaggaaacagaaagcggggcatctccacctgctggcagaagaccaaaactacaccatattgcattgaccgcagacatcaggctttgtttccttttaagtgaataggtgaaatcaatcaagcaaactggaattaggaaacagaaggaccactcacaaccgtacctccacagcaaagctaacactttcattttgaataacccctttccagcccctgtttacatcagtcacattttttgcatggacataatagtgtttcaggcagtcctgctctacagaaggcatttgtttcgctgaccataagcatcttatgtgcttctacattgtctttatagccagctgtctgaagttctacatcatccgtcagtgatgggtcctgagtaaactcagcagtctcctctaagtaacttgtatatatcccttttataaagaatgctgcagtggccacccttaagtatagaactttgtctttcccaggcattacttacaggaaactggggaccaaatgccactccatagcatagcttaggagaagtgagattccaaaggacagagtgggctggcacatatgtagtagaagactggacaaatgagagtgaatgagcgagtctgttgtgagtggatgacacgcaatgcaaccccaagggccggctccaatttgcacagtccctaaaacatcccagggatccagtcttatcgcagtctcatcaacattgacaataatcatttagagaattttcaccatgagacttttgacactctgctctgggattttggagttccaactgctttaacaatttatacagtcactcaaatgtagaatccagtgaattattaatgacaattttgctccgcatattgaaagggcattctatattaatcaattataaatcatgataaattgctttctaaaaattatacacttgaaacccagaaatgttcaagcccctcaccagtttacatacatccttaaccgtgtcttgttaactgggtgaccaggaaacagagaaaggaggatgtacttaatgaataactggccagaagtcggaagacctagattttcttcccatcccttccatagatttgctctgtgaccctagacaattcatatgccccctctgttaccatacttttaagctgaaggggttatagtgcatactttctgaggtccttctaacactggagatctatgagttcataagatcacatagagtcttggacttttcagagatcactaggcataagaaagccctcgaggacatcctcttcctagatcaaccactccaagctaagaccttaatgggtctacactgtcatccatttatataggagagaggatggtacaagctaagtgaaagtctgttgtcaactcaggaactagggtacagttccagcaatcaatctccatggagggttagcagaggtctggcctagccaattagggtttggcactgccatatgctactagaaaacacatgctttcatgccaggcaacagggtgggaagtgcaatgccattaaggaccataccttagcctacttaaactagcctgggattgagttactgagctcaaaatacaattcagcacactttcctgcccactgcaagtcaggccagcccctggagaactccagggacaaggcaagtctggagtttgtccccaaggaactcccagtctagtggaggagatgggcccatagcagagttacaaatgtccaaaataagagcacaaattcctgggttcttaaagagagttcaagcacacacacacagagagagagagagagagagagagagagagaaattaatttagataaggaagggaggtagggagagatggtgccagcaatggcttcctgaggaaatgtcacttgtgatgggtcttttaggtgagttggacattgagagaaagtaatcaaaagggcacaagatagggtagctgtcaggtaaacaaaacaaaactgtatgcacaaaggtctagaggcaagaaagcatgggtgtgcttgcatagcaatgaagaatgtggtttggccaaagcataggattcacagaaggacctccccaggccatcagtagtctctccttcgcaggagtccactgtggctggacgaggaacagatcaaaacaggtcttgtttgaggcttggcccaacaacagggccagctgttgaccagggcttccttcacccttagctttctctccccctagtgtagtcagagactccaaaggcagtcccagagtgttgtgccaaaacaaatgcacatcaggctattgtcatcaggagcccttgtcttgttctgtttgttttaagaagacataagtgaaataaccaggtttccgaagagagggcagaattgggtttgtccccagggaaaatgaggtttctccaccatggctgttctccccatgcagcagcggccaggggtccccagcagctctttgctcagtgcccctgatgctaggcctgatgcttcctatgtggtcagctcagatgtgcaacccttctccatttttattatttgagcaatataatcattattgcttttgttacccaaaatcttataatcacccatttaagagtaatgtaggaatcatttttctcttttatttgatgaactaatctttctggttggctcttgaggtgggaggggtgggcaatggggaccagcctgcttcatctcactctttcctaggcctgctccttaggcacgtgccccacaaatcccacctccgcaggttggaaaaggggcccacagaggatctcaggtatctgaggaagggccagaggctatttggcctgacatcctggaacatcaccagccaggagccataactcctttaggctagcctgcctgcaactggatcaggtatagcaaaaacgattgatctcaccttctaattttcaatgagtgggagtggctgccttgagtgctgtgttgggaaggagtctgaggcagcatctggaccctgtgtaaatatgcgtttcctgttattgatgaagctttcaagacaagattttagaaagctttggctcaagttgtaggttgtgggaggaaggaattagtaagagccatcataaactcaacatctattgtgttccaggagctgtgaccactcccttctttttagtcgggaaggtcaggatctcactatgtcacctaggctagagtgcaatggtgtgattattgctcattgtagtcttgaatttgaattcctgggctcaagtaatcctcctgcctcagccttctgagtaggtgggactactggtgtgtgccaccacactcggcttactcctccctttgtatcctgctgcatcgttagtgcatgatacccaccaccccctcagaggcccagcctagtgctgtctctcagaaaaacaccctttgagtcaacagagacaaacttagggggtgcctgactccaaagtccaggccttcctcctttgaggaacagcatggcttccccagggaatatcattccatggagacaaggcctgcagacagatctcattttcatctgttcttttactagcccttggaggatttgctccaaaaacctgaggcactgatgtttactccagctttacttcccccatacctggtgaacaactctggcccagcttccacacaccaaggcccatggctctaatagagccagagaggcagtctcagctaagaagagctgtatcctccagggaccagcaggaacttccagagatatcctacaagctccaactgctgggaaaagcagactggggtcttcctcaggctccaccaaagatagccaagtggcagcaatgacatgagcacctcattcctgtcctagaccctggcaattccatgagagggaggctctgaattcacctctgttcccaggatgtgtgacatcaatgcacattgtcataccagatacacctgccaaacttcagaacccctgggaagtgaccagaatgccactgaattcaacaccttagaccaatgaacatgacctgggtcctgtaggataggaggcagcagcagtgtatacccagacctgccctcaacatctctgacttttaggcatagcaggaacattggaatctctgcccccacttttttaaaaatctatttggattccacacacacaaaaaaaatgattttgaaaaaggaaaatttcgctccctaaaaacaagagtgaacattttatcaattaaaagtaacaactcatttacagaaagggaacaggcccagaaaagaaagtccctttcccttagtctcacagttagatttttttatggcaaagcacagactagaatgtattcttcctgaagcatatggtatggactgaatgtttgtgtacctacccctcaaatttatatgttgaagcccaatccccaataggatgtaattgggaggtgaggcctttgggaggtaattaagttataaaggtagagccctcatgaatgggattactgctcttacaagaagagaaacaagagagatgatctctttcttgaccacgtgaggatacagctaaaagatgatcatctgcaaaccaggacaagagccctccctagacaatctatcagcactttgatcttggacttccctacctccataaatatgagaaataaatgtttattatttaagccatccagtctatggttattctgttatagctgcctaaactaagacaccatactatccaagcacattgacacaagcctatttcatcccctgagagctctgctagaggttatgagctcatgtgacctgttgagtggcagaagtaagaaagcaagtgtcttagcttgttgaggctactgtaacaaaatgccaccaactgggtggcttaaacaacaggaatgtattttttcacaggtttggaggccggaaatctgagatcaaggtgtttgcagggctgtttccttgacttatagaagcatcaccccgatctctgccttcatgctcacatggtgttcttcctgtgtgcatatccatctctgtgtccaaatgtccccttttataaggacacaggttattaggttagggcccatcccaattacctcatcttaacttgattacatcttaaaagatgattttcatctcaataagattacattctgagatactagggtttaggactttaacatatgaatttaggggttgtctcagtctgttttctgttgcttacaacagaatatctgaaactgggtaatttataaagaaaagaaatttattgcttacagttgtggaggctgaactgtctctctttttctttctataaagccaccagtcccaattccacgataacccattaatccattaatccatcaatctataaatgaattaattggccacgcacggtggctcacgcctgtagtcccagcacttcgggaggctgaagcaggcagattgcttgaggtcaggagtgcaagaccacctggccaacatggtgaagccccgtctctactaaaaatacaaaaattagccaagcgtggtcgtgggcacctgtaatcccagttacttgggaggatgaggcaggagaattgcttgagcccaggaggcggaggttgcagtgagccaagattgtgccactgtactccagcctgggcaacagagtgagactctgtctcaaaaaaagaaaaaaaaaagaattaatcaattcatgatggcagagccctcatgacccaatcacctctcaaaggccccatctctcaatactgccaaattggggttaagtttcaacatgaggtttggaggagacaaaatttcaaaccatatagcggggctatggacaaaattctacccgtaacggtaagtataattagaggccagaggtcagaaataaatagtgaggtcgcaaaagcccaaagggctttctgagtgagacgggcgctggaaaggggatagggaaggcagctctgccccttgttttcccagtctctgcctctctgggtcgttggggaggagatgagaagaaacacttttccctcataggcaaacacatgtggctagacttactgaagcaccaggggtaacaatgctcttattgtccccttccttctccatcttccatgtgcatgtactcaccaacaggcataacggcatggccaggaacgtcaaactagaaaccacctcgaagatactaaacttcacaaagtgctttccttttacagtagaataagccaattgtccttcaatggactggcaggacatgtagctctcagtttctatagcttcagggatatccacagaataatagcagttgaatgtcttttaaactcaattgctggttttatgcaatcctatttggagagcaagtggcccagagagaagggacttacccaaggtcacacagtgagttagagacagacttggaactcagtccccagtttccaccttcttataagaactatcagatcatggggatacccaagctcaatgttgttttttctgtgctagcctccttctagcatgccatgttgcttacctcagtggaaagttagtaacaggttttcccaccatatatggaccctaaagatattcaacagggacctcctagaaatactgtcttgctccaaagaagggacagcttgtggtggtgtgcgtgtgtgtgtgtgtgtgtgtgtgaagggtgtgcatttccagcatcgaaatatgagctttgcactagttgtgtatctccaccttccctgtcagttgtaacttcctactctttggcagcccggccttgataacatattgcctcaaatctcagtgctgcttctgctctgctggtaggcctaggaatcaacggcaagtaacgacctactatgtggaggccgtgagaaagatttctgaatgaagtccacctgcacatggactttattgcaactacaccggctgctgagatggtgggagggatttgactttttctcattcttgattgaatatcaaacagatgacagggtagccaggtttgagatcttagatggtgagtaaggaaggatctagagaacacaatgtccaagctcaggttctagggtgctgaaagcctggagtacagcagagtactggcagctgcttgttactcaatagaagtggtactcagacactcggatctcactaacggtctcaaaggatgacatgttctccagaaacatggcctcttctttggtgaagtcattgaccctgtgccaagatgcttgtcaattagccatttgacgaaaaggcaattcttctaaatgtttcctcagcaagacccacgacacaaaatttgtctggggacacttgcatttgtcacctttctaactgccagctattattaaaggcattagaatagacctagagtaactatttcaccattaacataaagatggcttttaagttgtcctggaataaaagaaattgtgagactgttcaaatgtaagaggtcaagaacccaagtgagtggctgtttcatttttttaagtatctaataatttgcatgtaagagatttcatacaatgaaatgagttgaaaaatgaaggtgggaataatgtttatcttacctttctaagtcacaaaaggtactacagaactgaaatgtcataccagcccaatgaatttttataagctacccattttgtactgtctgttaaataatactgttcttagattcatcatcaaaaatccctcagaatcgttcttattttaaaatctaaccagaaaatatagttgacatccaactcatcagcattcttattaatgtgtgtcaagctatatggcaggtcctatactgtgtaccatatattttatctcctgcatccttggcaacgacccagtgtggcagatattaacaccattttatagctggggaaactgaggtccagagaattgaaatatcttgctccaagtcacacaactaataagaggtagagccagaatttgaactgaggtatttcttcttttttgctactatctgttcaataatcaaccaatagtagccatgtggctctgcatagactatggtgggaaatcacttggccaaggtttgctccccctttgtagaagatgagagaccagttttcacagccatataaattgtgaaatgcctctctcgcataatctcatatttggtcccattgacaagccaatccaacattttcttccaatgagacatagaaagttggaatatttatttatgagaacgagtctacatcaccttccaattaggggctcacatgccctacttgggcagcctacctccataacattaacaccttgagatgacttgtatctagaggcataccatttgtatttactgaataaataaatgagattattattcattattacaaaggggatgctgcaaaaagggggtctctgacagtgaactgggtgagacccaaatgagatgaaagagttttaggaatgaaacagtgtgttttcaggagcagtgtgtttctccagccccaagaccctttatagaaacaaattcgtttggaacagatttgctgtgttgatgaattcacccattatgacttgggcaacatgggtgagacaacatgttctcctggcacaaataccgatcttagattctcttctcttcctgtgggtagaaagcatttctgaaagaaatgggaaacatctggggaaaaatacaacaaagcggtgaacatcagatgccatccaccagattagctcctgagatacatttcctgaggaagaagaacacaaccttaatgcaattagatgacaatactgcaagccaaccaagaagctaaaaggtttaggtatctccctaagttctaagtggctttgtgtgcaccagtttaactttccaccaagattttaggagtgtgacattggagcctatgaatttagatagctcattggttgtgggacactaaccacgcaccagtatcaagtatgtttttagatccctcaaacatgaggagaattcaggtagagtattgcatgctaccacctactgcagactcggacacagctctgaatttctattatggccttatttataactttcagacttcattaatttgggtagaattatgatttggctttggctttttattaaggttgtgtgtgacaaaaaagttatgctttcaatttgtaaaagcaaatacctacgtgagacctgtcatggccagcatgagctgcagacagtcacgctgatggggttaattgccattttaaaataattcactgcctccagattgattcttctgtgttttgtctttacacaacattactgtttctcactctaattattcaatgctaagttcatacttctgaagcaggagattggagtcagaggaaatggtgtttgatttgttgccatggaaacatctcgctgtagatggactctaatcccatgacaactctctctctcttaagaaccatttttttctgacataataaaaatctgatcaaggtcagatttaataaccatctcaattccccgactttctcctgtatttggtgtcagagagtcattttgacaaagcgatgattaaaagaacttttgcttgctttctgtataaaattattgtttatgcctctaaatatataaacctggctctgtgtcacattaatttgcagccataccctttgttattgcataatttctgcattaaaaaagttacttataattgaattgtttgcactatgttggcagatgttaacattttgtggtgcattgttcttgctaatacatacattggggtatcaataaagcttatcatttgtcaacaaatggtgtttacagtattaacaaatgccacgatcatttatctttcagtttgtattgtaataattttctgaactgattatcatgtaagtatgcagttcattgagatgggaactgtgcaatgctgcactgaaatgaaatgaaatgcttcatgttcagaaaggtaaatgagaaattgcctgcagtgtgaccttaagcaaggcccttcctctctgggcctctgtggcctcatctgtacaatgagattttagaccacatgatctctaaggactcctcctacatctggcagaccctgatcttcatcagccttgccgggtaagggtcataggctcctgcctggaccctctttctgagggttttatgaatcctgggtctgtaaccgagtctcctacttgccatgcatatggcacttggccagtctgaaagcttttaatttgcttcattatagccttacactcatcttgtgaaggggaagggcagggatttttaactccagtttataggtgaagagtctgggactcagaaacgttaaaccacatgttcaacatcacacagcttctatttagtataactagatctcatattcccattctttcacacggtcaaaggagtcatgttagtgaaacactgctaggtatacagatgcatcgaacaccatttgtagacaaatgataaactttattgatacccctaatgtatgtattagcaggaacaatgcaccacaaaatgttaacatctgccaacgtagtgcaaacaattcaattataagtaacttttttaatgcagaaattatgcatcaaacccctttcagattcacaatttttttttttaagacaaagtctcactctgttgcccaggctggagtgcagtggcgtgatctcagctctctgcaagctcctcctcccaggtttacgccattctcctgccccagcctcctgagtggctgggactacaggcactggccaccacgtccggctaatttttttgtatttttagtagagacggggtttcaccgtgttagccaggatggtgtcgatctcctgacctcatgatccacccgcctcggcctcccaaagtgctgggattacaggcgtgagccaccgcgcccagcccagacaattttgaattccagctgcacttcttactacttatgcatcctgagggaaattatatcaactatctatacctcagtttctttatctgtaacaaggggaagctaacaacaacacctcactgggcttcgaagttaattaagggagattatgcatgtaaagtgcttaccacagagcctggcacacagtaggtgcttataatggcaatgacaatgagcatcatcatcacctccactatccactccaaaatattacaccaaatattacaaatcctgctcagtggtctccactggcagggagtagggtcctcccagctgtccaccctctgacagctacctttacatactcactggagatccaggggctttcttttcctttcccaggcttttgcacattcatcattcccaatgactacaaatcttacagaaaaataccaaacataaaataaaccagatgcctacatgcttaaatcattccattccttgacagtcattctgtaaacatggttctgatctccctttagacataatgggcccatgatttgtgtgacaaatgtagcagatgcaaatatttttcttgcctacttttctgctttccttccacaagtcatcagagcttgttccacagaaatctgtgaaagtgtcattctctagagtgagagtctacataaggccaggtcacctgagagaccatcatccatctggacagggattttctcccatacttgacttgctttgcaattctatcaatgtctgaatacactggcctggtgcaagccttagagtgatgtagagggcggatgaacaacttttcattgcttaggaggatgcagcttcatctacctgcctcctagcaaggaaaaccttggtcctcagtactttaaattgtttttcatacttgttcttgtttatcggttgctgtgtgccaaggcatagaagacaacccaattctgactctggggcctccatgaattgttcatgcaactctcctctcctggcttcccatctgataccccccaacacacacacacacacacacacacacacacacacacacacacacacacacaccatactcaccttaaaataagtagcttggatgaaatggcttccaataagcccttttgtgctgacagtggggaagtgggtaatttgtctcagccaccctgctggatacacgtccatccagcaggactgtgaataattgctctcagggctacaggctcaaggaggggcaaacattgagtcattgttgcccactgctcttgtaaaactcacttatttttccatttaaaatgaaccaatgaagaaatacgttaaacaagaagtgaaatattttacagacttataagacttatgaacaaggttttgctctctgaatgttagtgcagagagtacactaaaaatatacacaaggtggtaactggattatactctcttcaatggccataacaataccttcctctctgatgagattttaaataattgagtgaactgtggcaggtagtaacagcacataagatgatatggttaggctttgtgtccccactcaaatctcgtcttgaattgtaatccccataatccccacatgtcaagggagagataggtggaggtgactgaatcatgggaatactgttctcgtgatagtgagttctcacaagatctgatggttttataaggggcttttcccccttcactcagcacttcttcctgctgctttgtgaaaaaggtgtcttgcttcccctttgccttccaccatgattgcaactttcctgggacctccccagccatgcagaactgtgagtcaattaaatctctttcctttataaattttccagtcttgggcagttctttatagtagtatgaaaagggagtcaggtaaagagaccaaatttctatttatctcccaactcctactcagtcctccctcatggattatccagtttgattttgggctagccagcctggttttgtggcaagtctaagtttacaaaaatgttttaaaagtactactacctttataatatcctccaaatgggtgatctctccatttactatgctacttccatgattcaaaccctcaccacttctctccttgtcactataccagcctcttagctggtctctctgccctctgtcactctccttccattagggagatcttgctgaaacctaactctctcaaaaataaaatgcacaccttattatgtccttgaaatcctttataaactgtctactcttttcagaataaatctcaacctcttaaggggggcccactaggcccacccgatttgactcaacccacctctttgactcaactcttctgtcatgtgccaaataatatcaccctctggctcattcatcaattaattcattatttctcttcctctgcttgtcccaacccttgtgtctagaaaaagggatcactggcattaattaaataccttctatggtatattacctacaaaaacggccacagcaatctcttcccttcctatatacacacaatgttcctcccatcaagttaatttgctctccccttgactctggaatacatagccctgtgacttgctttggctaatagaatgtgacagaagtgacactgtgacttataagcttaagccttaagaaggcttggaagcttctgttttcgcttttgaaacgctcaccattgtgtaaggaagctcagcctaaactactaaataacaaaagaacacttgaagagagaggccctgggaccacatggagagagacaatcattcatccaacattcaaggacacagcaatgaacactcataggtcctcttatatgataagcagaacatgggctgtgatcaaagcagagaatgggctgcagagactagatatttcaattctaccagttatattgcctgcgtgaccttgaagaaagcatataacttctctggatctcaggatccttgactgtacaatgaatgtgaaaggaatagctctgcttacctcacggggctatgatcagacccaggtgagattctgtggcctgagtaaagggctccatctatcatgaagtgctgaatctaagtaatgtgatgtcccagttggctcaagcaaggactgagtaatctgagcacgtctcccagataatgtgaagtggggacagaaagtttgaggaggatttcacaaggaatgaggaaaatatgaggaagtttccccaggttataagactcaattacaataaagagagacaaatctgtcccttgataaccaacccagctgtgcctgtctctataacgaaggtaataatggtcctttccccattatttacccaaagtgccactgcagagtctagaacaggttagtggactcccagtgctgaaaagaaaatgaccaatcatatggggctaccagatattgaacttctgtcaattgcctggtgaccaaagccatgattgttctctcttgctcccccagtttctctacattccagtcttaattttgtaagaatgcatgtcaaaaaattttatggcaagaaccaagaactgaaataaaagtcaccacaagcaaataagagcaattgctgtcagaaatcacatgcagatcggttttggcaaatattgggaaatgtctcacaatgctccagtgagcactgagaaatgcccccaaagagaccctgctgacagtatggcagaaaggtacaggtgagggcaaatagcagaaggcaggagctcgcttccacttgacagaaagttccataacaaaatctccattacctttaatgattagttttcagttttgccttcctaattagtgatttcacccattctctttggaaaaagcacactgcactagaagtcaggagacccctgttggaatccctggtttgcctcctacaagctgagtgagcttgggcagaggctttgacttctctgattcagttttctcatctgtgacatggggtgaatctccacctaccccacaagcttgtgtgagagaagggagggcaatgtaatttgaaggctgcaaaatgctagaaaaatggaagtgatttttatgattaaatcaagactcggaatttacacatttgctgcctgctctcgaggttgaaaaatagagctcaaaggtcaagtgcaattcattaaaacctaattagaagacaaattgtctttcatttaaacgtgatacagaatacagccgcttaaggaataaggatagtttattttaaactctttgtttcaattcaaagcttccaggatttatggagcagctgctctgtgcaggccttctgaaggggacacaaagaagcagagggcaccatgcccaccttcctagagcttgcagtccaatatggatgagaagacaaggccacaaataaacaagagacagagcatgcttgggggctgaaatagctacaagactaatgccgtaggctagggttcccttgtgtgcaggagtgttatctaattgggaagaagttaagacagtactaaaagaaggacttgaaggagcagcatgtgtgttggcagagacaggcagcagacagaagcaaagtagcagaggtggcagaatgtgggcctaatccagaaacccccagggtctggcctggctgtggcacgtgtaccccacagacaagctgaagacatgaggcctttccttgaaagccaggaagatcaaactcaggaattagaccttcagtcagttgtcagtgcagagttgtagacagcacaggattgatcagaaatgactccatgtactttgattaccctctcctgacttaaatgactccagagttttcctatttcattgtcatgcccaaatgcaagattatacatacttgatctgaccttggtcttgaacaacccagctttttcactcagttagccaggcttcctttccttccataatcatttattgagcactgtgatggctttttgatgtgtcagatattttacactcatggggactcagctacagtccccatttagtcaatcaaacatgaatctaggtgctacggtagaagggattttgcagatgtgtttaaatttcctaatgaattcacttaagttaacttaagggagattatcttgggtgggccggacttaatcagatgagtctttgaaaagagagtttaggccttccatgaggcagagattccaaacagctcctgctccagggtttcagcctgtccatggtcttctctcctgactgctgcctgtggataacaagcttcagccagtgtctgtgaagttctagcctgctagcctgcttgtgatctttcctttctggctgcctgctctgcagacttcagacttatttagccaggcctgacaatcacataagctagttccttgcatacacacacacacacacacacacacacacacacacacacaagttgagtatcacttatctgaaattcttgtgaccagaaacattttggatttcagattttttatagattttggaatattcgtattatacttactgtttgagcatgcctgatctgaaaattcaaaatccaaaatgctccaatgtgcatttcctttgaccatcatgaccacgctcaaaaagttttggattttggattgttttggatttcagatttttagattatggatgctcaacctgtatataatacatagtgtatataatatatattatgtagtatatataatagtgtagttttatatatatatatatatacacacacacatgcatatacatatatatttagaaagatagatagatagatatgctatgtctgtgtatcttactgttccttatgtttctttggttgaatcctgactgacacaaggaactgcccagtacaaaactctgtgcagggtactaatggtatagtggtgagcgagacatagtccctgtcaccaaggagctcatgagttattggagatgaaacaggcaagtcaactggcatttccagatagcagatcagtgctgggaaagggtggcatgggagcacaaaacaaaaggacatttaacctagaatggggaggtaagggatgctatagggagatatgatgacaaagtagaaacctgaaggataaggaatttgccagattaatggggagaaatgaaaggtgttcccagcagaggaagcattcccaatgctgagaacatcttgctactcattcaagaaaattctgaagtaaaatactctgaactcaataaatatttgtgggattaattacttgatacacataagggaaaaagaagacattgccctgggtaggaatataagccaggaccaagcattgcttattgaagtaaggaaacaaatgagaaacaaacaattccagaaattgagaagaagagagaaaaaagtaaggtctgctaagatcctttgaataagtagttaacctgagcacagtctaggaaaggcccactggacttccttccacacgcagaatcttgcctttgatactacacatcaatttgttgagacctgtaccaaagtgacagtgtagttataagatgaaagaagcccccgaggtacagagtgttgatgaatataggccaaaggaaggtcaaggtcacatggtggaaaggaagatcatgtctgataaaggggactatatctcccagagcaaaagaccttggccatatttgtagatatagtctttcaaatagtttcaatttttattcaagcttttaatgtaattatttggcagtaatccaggaaacaaaatataaaaacaaatgtaaagggaaagaaggtatggctgccttaagtttaagagaaaggactgatgcagtgcaaaatggaatctagcctagaaagatagatctgataataatagtgaaaggtgtttaaaagtgcctgacgcagctctacagaacaagattggtgagatattgatcccttgaggaaatgaccaagcgcaccaagcagcaatccccaggaaggttgctctaaaaaagaggaaaaccaaccaatcttttttcgtggtgggtcaattctgctgattcaactgacatttagctgttgactttttagagtctgaaactatacttagcgaaagaaaattgcactgacaaaaactatggacataatagtagtaatacaccatgttattcctcttgtttttcttccaaaatctccgaggttaagcatgctttatccatccacttaaccatgcttaatgccaggcactagaactctagagatgaatctgtcgtggtgcttgccctcaaggaacattctcctgagaggctccaagagataaaagtggaggagaaactaggagaaaagtctacatgggactccaaaggagtcagttctactgaacaggggatggttcccagatagaatggctgtttgccagttggacaaccgtcatgaagaggtgagaatgttccaggcagaatgagtcatgggaggcaagattcagagtcttgaaacttctggaactaggggtatatcctactggctagagagttagaggggaagggagtgctgagagggaggtaagagtgatcctgtaaccagtggttctcaattctgtacataacagtcacctggaaacacagaaaattagcaatacatggaacccaatagagaccactgagccaggatttgtaatattttggtgcagaccaacattggcaaaccaaggatggagacattgaagaatccttgcagggttctttgatgatgaatgccatgttcatcagaccttgaatgatatttagagtcttaataggcatttcagccacaagtgttttccattaaaacctttacacgtgctgactgctattaaattaaaaaaatttaaccagcctttttcacaaagcccaaagtgtattttctgtgtaattgtgttgacacaacagggatttagtcaactcaatcatggaaatcctcactctcaatttcatgaacctcttatttttttcatttttcctacttttgtttgccattgctcagtacagaggccttccctgtgacttcccttcagcatcagcaatagcattcaagaaactggcattgctcactctgaagagctgcgggaaaaagaggtaaagaagtgagaacttctccaaagctgttccaggggagagggctgcagattggaagtcctgcataagctgacgtctgtgctgagaatgaaggttgttccagaaattgagaagaagagagaaaaaagaaaatatttctggcaccatcaccagatagttctcaaataggtacacaagttacccttaaacatataaaaaggtggtcaacttactcatattaagataaatgcaaattaaagctacactgagacttctggttccaggaaaaaaataggattttttgcacacttccagtaatgggggggacatggcatttctccctaagtacagctgaaaaccctggacactatatataaaacaaacatgagaagattttgaacatcagagagaaggaggcattccaggacctgggcatgacatgacagtgagtttcctgcttttttttccccccccccctcatatattccaccgagagtgaagaacctggcaatgtggaaaggccaataggtacaggaaaaaaggaaatttccacaaaagtctactttcttcagccaaaggacccggaaaggagcagccacattgagacaaaactatcgaacaacagtcactcaattttagtcaaacatcacagaaataactatggcctcagccccattccagccaacaaagactgagtggggagcctagacttccatcctcatcacactgaaaccaagcaccacaagagtggtgtcgcagaaggccaagtgatgagctgggattttcaactccctctccccagcagtaaagaggctgccatcatgctgtgtcaccagaggcacatggagcccattggtaacaagaagccccatccctcttgctacagtggtgtcagaggacacttagtggaatctatattttcaccatcatccattggtgacaaagctacccccaatggtgtcaggggagaccatacagggaagcagaatttctacctctgaacagcagtaataaggtgtccttcccactccctgcttgagtggtattattgaaggtatctcctgctggcagaaatcaaccctgcccccctatgcagtatcagtggaggccctgtgaagggtagtaatgaggtgtctttccccatctggaccagggatgtatcagtggaagcctggtggggagtccgaatgaatttctacctccgtccagcagtaataagaatccctgagtgtcaacagaggcccagtggagaacctagaattccatcctcaactagcagcaatgaagcagcactcctgttctcagtcaagctggaactctattaaatacgtttgttggtggtaatggtatttataggggtgacagctccaaaactactttttgtgtattatggaaatgagcaaagaataaattcgttaatgttgttggaaactaaagttctcactctggaaaaaaagttatataaatataaaatagaggaagacagaacgctgaattaaaactaaaagtatcattatcaagttacaatttaaaatttggggtgggtacgtgtgtgtgcgtgtgtgtatatatatatttctatctctgtccattgaaagaagctagaaacatggataccctattgacaatgagctcacctagcgaccaaatattggtttaaactccccactcaaaagagccagagcttcttggaaaagtggctgattccaggctagggcagagtaggggatccctgttgaggcagccaccccatcgtagtcagttgtctgttggcatcttctgtgataacagctgactggactacaggacagtggaccaaaaggccaaaggaaaaccaatcatttggggcctgagcctgatcgtgatcggggcatcccaagaagcctctcaatcaggactgccttgctatgctccctcagtattaagttctcttgaagactttggcctgcctcaacagtgccacaggaattaatagaaaatgtttgcatcctcacctgggctgaatgttcagcaaggactggacatagtattagggacagccaaagccagagcagccccagaaggactatggttccccagtgttccctcagtgtctcttgaagttctttttggcttctcttttgggaaactcagatggttcttacaacagaaaacatggtctccaacaagcttgggtgaggcctaatagggtttgatcattttggttacctcctttggtttttggcaactttatgttgggaagtggttctcactccttcatgcagtgggaggctagaatggccgtcaatctgggagggaagctttctcagtatcttgtatgatgtgtgccaggaggaggtgcccacagctgctctgctggcactgagatgggtcagggtgtggactctgacctcagtagtggctggccttctcagttgggcagtccttccttcagctgtctattttttaaggagcacttattttgtaccagctcaaaaaatactgagaagctattttgttctgggaactagaggtccaaagataaagaagttgtgccttgttcttaaggatcccagtctttggccatagagagataactaaactaacgagtacaacatggtgtggaacattctgcaattgaggtaagatcaaaatgcacagtaacactcaggaccacctttcacctcttagattggtaaaactgcctagaggagacagatacaaagcaaataataccaccaagccttgcataattacaaaccatgagaaatgctatgacaggatgctattctagaggggaaaaagctgagttcagtttggacatgttgagtctgagggacctgtgagctggtacctgcactttgtattacagaagagatgtaagtagaaatctagtccaatgaataaggaggcttgatcttgtacctcttaaccctcttctcactggcaaggtaagtaacagaaccaagagttgcaaaggatacaaagtgcccttgggcaactgtgaattaatttaataaattttatgcctgataaattcagggctatacttgggctggtaaatgacagggtcctacagattctctaagtgaaatacagactgctggaattccaagggtcttagagattgcctactaaaaattcttcactttacagataagaaaccctcaacccagagagcagatctgctcaagttaatatggctggtttttgagatgctacacacttaggttttctttagtgactttttgaccttgggcaagctctttaagccccttgtgcttcagtttcctcatggttaaatgaggaatagtgatagcatctactccataggcatgttgtgctacttctttggtggcactggagtctgtgtcctctagctggagtcttccttcaaagggtcagccaacctagtgagtactcttgcaggcagaagatgactggaccctgtgtttgcccagaggcagttttagtattagggcttcctgcacagagatctgacatgtgggggaaatgcctagactgccatatccattggattacaagttgaattgataacaactatagtcataaccattcgcactgagcatcaaccacgtgctgggcactgtgttagagactttattcattgcatggctaaccataaaaccagtctcacaaagtaaataggatcattcctattttacagaagaaagtgaagcaagtgagaaactaaataaatattccaagaaatatgacaagtgactatccttcatatataaaaactctcataagtcagaaagtggaaaacaacacaaatgaggcaaaagacaaaaatagacaatgataacatatgcaccatatatatttaataaactttaaaatgccaacatgattggcaatcaaagaaatgcagatgaaaataagacaacattatttgcccatcaaattagcaaaaattttaaacatgaaaatacataaaattggcaaagcaaatgggatatgactatttatacacttatgttaaattaccaactggtaagacttttctgaaaggcaatttggcaaattatatgaaaatcttggaaaatctatattgtttgactcaatatttctatttacaaaaatgtatcctacagggataattagaaaaatgcatccatttgtgaatgagagcatttgacactattattaaaagtctaattagtcaactaaactctggcatatttacgtgatagagtacaactcggcattaaattatgtttttaaaagtatattgttcataatataattaataagcaaaataaaacaggatacaaaatatccagcatgacctcaatcttatgtttgtacagacatatacacttaatacattcatgcatatgtctatatgttcatagaaaaattctgaaataactcacaaaaatattttaacagaaggatctcagggaggtaggaatattggcgattttaaaattttcttttctgcattttccaattttgttcagtaactttacaatcagaaaatgcatatatttaccaaaagaaaactgtaagttattctaaatgagtttgtacctcctggcctgggtaaattctgccccaaggctcatcataatgacagaataattaaagtctagcaatccttgagaaatttctcttgtaagaacaggaatgatattgggacactagaaaagacaacattctatcccaattttacaatatgagaaggtggcaaattctataaatcagatagtttagtggatttataaccagttgaatgactgcctgtatgcctcaaattctaattaactcaaacatgttagaggcagggggacctgaggcccatctagtgtaacaatttccaacaaactcttggatgcagacgttgatggcctatagatcaaattgacaaatatcacaaagctgggaaggaaataaactatatcaaagagaataaggacacacagttatttaaatggaagagttggtgaaaaaatatgaagtttaataaagatagtgcaaagttctgcacttaggtccaaaaagtcaatgtatttaggggaagacctgaataaatggcattcataaaaatgaattgtgggtttttaataaggaccagttgtatcccaaacaattgtgagatggggctgccctgaagaccagtgtctgctagggctctctgaatagaatatgcggctcagaacaagtgaggtgatgaaccagcccaactctgtcccaaggagaccacagctggagggacttagtcagttcttggcaacaacatgctctcagagggacattgaattcttgaactttgataagagtaggtgaccagcaaggcaagctggctcatctgtcacagggatttttgaactggagatgtttgatccaaataagagaaagattgagctgtgctcagggatttggcttactctgggtggttccaagagcatctgaatagggttcagcacaaggaaagtctttgaatgggtatctgctccctgagggagtaacagcctgaatggccactcaggtgaacactagttcacctatactgaaacaggagagctccctgaaccccctcgcatgacatgcgacaggtgtgtagcttgtctcttcggccaccacacactcaaaccccttacagtgggggaagcatgcagacaggcaggagcatgaaccagggcaagtgtttttgggctccagtcccatggtagtgtctaggactgggtgcctgtgactcctggagccccagtgagcatgttacagtgcttttatttttagctctgctgtttacagatggcttaagtgttaaccagctcagcgccctcttggtatccaggtccttgtctggcatccagggagaatcaggtcacacacagacttgaaggatggagaatgcggaggttttattgaatggtgaaagtggctccttcatcattggcttcaccatcccattggctcccaacaagatggatggggaactggaaaggggatggagtgggaagataatcttctcctggagtttggccatcctgcggctgatctcctctccaaccatccctgactgaactcctctcaacatccagacagacgctccttctcttctctccttctctgccatgccactcttctgttcctctgatcttctgctcatcttctcgtggagcctggggtttgaggcttatttgagtacaggatagaggggtgtggtgagccaaaaggctacatttgggagcaaattcaggaatgccctttcccttttagggctgcgggtttccaggcttaagggtgaggtctttgctggggaaacatcctattttaaccagtatttccttgcctcctgtccatatcaatatgtcctccaagattcattcagtgagccatttccctgatattcgcctaaataaaagccctagtgttatgtagacctagaagtctagcagttgctggtctataattattaggtaggtgcaaaagtaattgcagtttttgcaaatacttttaatggcaaaaaccgcaattacttttgcaccaacctaatactaaaatgtagctggaaggagtgatctattaaagtgacccttgcaaagccatgtttgtggttcttccttggtcccaagatggggagacaggacaaagtatacaacaaatgctctcttagttttctcctgtcacgaaaaccaagccccactttccaggtgataagaatggagaaacaattatctagtaagtggcttgtctcttccaggcttctgttcagatccattccacataatttctagaaaatgtttcacaaatcatagatgtatcaggtatgtcacttgcacaaaatttttcattagttcctcagtgtccgggggaatgaggcagccctcccttcttttagccaagcatctgaggcctgccacagtctgttcctatgctcactttccccacacagcctcggctccattccaatgaaatggactcctccttcccctttcccaagcattcccaaaacattcccacctgcatacatctgcttctgctgtgtgtcaacccagaagggcttcttgccctgccctcctctccaccaagctgatcctctgcttccctgaaggcctaccctacactgctgtggcctatcaccccctttaggcaactaaccaaggataccaggtggcatatgctctctcagggaggcttaaatccctcaactttgtatcctgcaccccaacacaggccttgcttaatagatgtctggcaaggagggcacagctgtggcagtgcagccacagaaatctgggaaggtcattaagtagaataatatcccagaagggtgtgtatgctcttctgttccctattatcctgtctgcttgtacctttcaggtccttgacaatttatggtgcagcaaaaatcccattagaacaggctacatgaatttgttcaaattatgtcattgtactggaatttgggtgtgttgaaggcaattccaaataaaaaaaattactgtccaggacttaggcaattttcatttgagtagaatttgctttgtcatgtcattaacaggaaaaagatctacttagtcttgactttgcccagagaatgaagtgataaacacctggagaaaaattataattacagtttgtaaaagctaaacatagcccttctagtttttaattagagtatatgttatgtggctgagggtgactgatggatggaatttggtgccataggatcagagacccggagcagcatggtcctgtgtgtagccaaaagcaagtgactattagatgacatagcttgtgatgctaagccctgactatatatttatattttctgtataaacatgatagcctctcttctgttactctgaggaatctttgataattcacatgtgaaattaaaggcatcttattcattcagttatttattattctctgtaaaatgagttaggaatttgtccccgtgaataatgttagccataatagttaatttactcctattcattggcagtaataaaaatgtacaaggggaggcagaaacattattatttcttgcttgaagtgcaatttcatgtggtgagaaaaacatgttaatatgctgcaaagtgctacaggaatttagttctcaaaggaatggcggtattaaatgtattctgacaagaaggagcctcggaagggaaacatttatcttcataaagtcattaaatttactgagcagcatcacattcttcctgcaatctgctcactccattaaaggcgaagccgtggaactggctctgtcacatgagaggcccctgcatttctgaacagaggaagaatggtgctctttctcctaatattgggtttccccgtcaaaaccaacaagctcacgcacagatccacacatgggtgctctgctgcctctttccaaaacaaacaaatgaggtactgacaagattctgcctttctccacgatcagatgattctccgtgtgactaagaaaaaaacagattttgcaaagcctcctgtttcatcgttccaggagactcttggctctgagggtgttttcccatcccactgagttggagtccaggcagcttacacaggtcagggtcagcacgatagcatgagttgttctgcagagcagttttgtgtgtatgcatttcaaaatcgaggtattcttattcatacacaatacatcaatcagtgtttttgaaaatcacagcaaaagacagggctctggtaccttggagttatacatttcccttgttcttttcaataggtaggtgtcattaatgagctaaaatcaccaagaaatgcaaacagacttcagaagcaaagtcatgctgtcagcttggacacatggcagggaatgaaaacaaattgaatagttttcaataaattataatatcattcccattcacctgatacctttcttcccaacactttgcaaacagctgttcttctgagaaaaaggacaaataacttgcctgcattcatgttgagaaagaatgctatttcaagtgcagttgtggataatgattttaaaatcccagcgcaaatgtatctagagaagaaaatgtctctaactgaactaagaagctaaaggttcctccacactgtaccacaaaccacagctagggctgcctaaagacaaatacagaagagtcaagccctttgtttggtgacatgaaaaccaaaccattgaagggatctaactgtaagctccaagaggtcagagacaatatatttcttgatcactgttatagtacaagctcttaacccacaggtgctcaatatatatttgttaactaaaagagtggatgcatagatgaattgctcagttttgctccaggggtttgtagggtcagatggataaattcctaatcttgtcctccaagcaatattggcctgtccaaaggaaactaggttttattagcaagatgaattctgacatgtttaaccaggtagagagaatctgcagtgaccaattcccagaattgggattctccattctgagagaagaataatatttgttgtgtctagcatgtgctaagtacttgacctgtgtttttactgaatccttagaacagcccatttaacaaattaggactcttaaaaaggttaagtaatttgcctaagaggacacagctagtaactggtagaaaactacctacaactcattcattcatgtgccaactatccagtacagggcttccacatgccaagccctattctcagtgctggtttgaccacagtgaacaagagaacacagtccttgtcttcctggagccaatgatctaaaactggagactgtcattgaacaattaatattccacttaatcacatgactatactggtgataagtgtcaggcctctgagcccaagccaagccattgcatcccctgtgacttgcacgtatacacccagatggcctgaagtaactgaagatccacaaaagaagtaaaaatagccttaactgatgacattccaccattgtgatttgttcctgccccaccctaactgatcaatgtactttgtaatctcccccacccttaagaaggttctttgtaattctccccacccttgagaatgtactttgtgagatccacccctgcctgcaaaacattgctcttaacttcaccgcctatcccaaaacctaagaaccaatgataatccatctccctttgctgactctcttttcggactcagcccgcctgcacccaggtgaaataaacagccatgttgctcacacaaagcctgtttggtggtctcttcacactgacgcacatgaaatttggtgctgtgactcagatcaggggacctcccttgggagatcaatcccccatcctcctgctctttgctccatgagaaagatccacctacgacctcaggtcctcagaccgaccagcccaagaaacatctcaccaatttcaaatctggtaagcagcctctttttactctcttctccaacctccctcactatccctcaacctctttgtcctttcaatcttggcgccacacttcaatctctcccttctcttaatttcaattcctttcattttctggtagagacaaaggagacacattttatctgtggacccaaaactctggcgccggtcacggactgggaaggcagccttcccttggtgtttaatcgttgcagggatgtctctctgattattcacccatgtttcagaggtgtcagaccacgcagggacacctgccttggtccttcacccttagcagcaagtcccacttttctgggggaggggcaagtaccccaaccccttctctccgtgtctctaccccttctctgattttctggggcaggggcaagaacccctcaaccccttctccttcacccttagcggcaagtcctgcttttctaggggaggggcaagtacctcaaccccttctctccatgtctctaccccttctctgcttttctgggggaggggcaagtacccctcaaccccttctccttcacccttagtggcaagtcccacttttctagggggcaagaaaccccaatcccttatttccgcaccccgacctcttatctctgtgccccaaccccttatttccatgccccgacccctttcccacttttctggagggtaagaacccccgaactgcttccctccgtgtctctactcttccttttctttaaacttgcctccttcactatgggcaaccttccaccctccattcctccttcttctcccttagcctgtgttcttaagaacttaaaacctcttcaactcacacctgacctaaaacctaaatgccttactttcttctgcaatgctgcttgaccccaatacaaactcgacagtagttccaaatagccagaatacggcactttcaatgtttccaccctacaagatctaaataattcttgtcgtaaaatgggcaaatggtctgaggtgcctgacgtccaggcattcttttacacatgggtcccttcctagtctctgtgcccaatgcaactcatcccaaatcttccttctttccctcccacctgtcccctcagtcccaacaccaagcgtcactgagtctttctaatcttccttttctatagacccatctgacctctcccctcctcgccaggccaagctaggtcccaattcttcctcagcctctgctcctccaccctataatccttttatcacctcccctcctcacacccggtccagtttacagtttcattccgtgactagccctcccccacctgcccagcaatttactcttaaaaaggtggctggagctaaaggcacagtcaaggttaatgttccttttctttatcagacctctcccaaatcagtgagcgtttaggctctttcatcaaatatgaaaaacccagcccagttcatggctcgttcagcagcaaccctgagacactttacagccctagaccctaaaaagtcaaaaggccagcttattctcaatatacattttattacccaatctgctcccaacattaaataaaactccaaaaattagaatctggccctcaaaccccacaacaggacttaattaacctcaccttcaaggtgtacaataatagaaaaaagttgcaattccttgcctccactgagacaaaccccagccacatctccagcacaaaagaatttccaaatgcccgaaccacagcagccaggcgttcctccagaacctcctccccaaggaacttgctacaagtgtcagaaatctgaccaccaggccaaggaatgcctgcagcccaggattcctcctaagccatgtcccatctgtgtgggaccccactggaaattggactgttcaactcacctggcagccactcccagagcccctggaactctggcacaaggctctctgactgactccttctcagcttagtggctgaagactgatgctgcccgattgcctcggaagccccgtagaccatcacggacgccgagctttaggtaactctcacagtggaaggtaagcccgtccccttcttaatcaatatggaggctacccactccacattaccttcttttcaagggcctgtttctcttgcctctgtaactgttgtgggtattgatggccaggcttctaaacctcttaaaactccccaactctggtgccaacttagacaatactcttttaagcactcctttttagttatccccacctgcccagttcccttattaggctgagacactttaactaaattatctgcttccctgactattcctggactacagctgcatctcattgccacccttcttcccaatccaaagcctcctttgcgtcctcctcttgtatccccccaccttaacccacaagtataagatacctctactccctccttggtgaccgatcatgcaccccttaccatctcattaaaacctaatcacccttaccccgctcaatgccaagatcccatcccacagcacactttaaaaggattaaagcctgttatcactcgcctgctacagcatggccttttaaagcctataaactctccttaccattcccccattttacctgtcctaaaaccagacaaggcttacaagttagttcagaatctgcgccttatcaacaaaattgttttgcctatccaccccatggtgccaaacccatatactctcctatcctcaatacctccctctactacccattattctgttctggatctcaaacatgctttctttactattcctttgcacccttcatcccagcctctctttgctttcacttagactgaccccgatatccattaggctcagcaaattacctggtctgtactgctgcaaggcttcacagacagcccccattacttcagtcaagcccaaatttcatcctcatctgttacctatctcggcataattctcataaaaacatacctgctctccctgctgatcatgtccgattaatctcccaaacctcaatcccttacaaaacaacaatgcctttcctcctaggcatggttagtgtggtcagaattcttacacaagagccaggactgcaccctgtagcctttctgtccaaacaacttgaccttactgttttagcctagccctcatgtctgcgtgcagcggctgccgctgctttaatacttttagaggccctaaaaatcacaaactatgctcaactcactctctacatttctcataacttccaaaatctattttcttcctcatacctgatgcatatactttctgctccccagctccttcagctgtactcactctttgttaagtcccacaattaccattgttcctggcccggacttcaatctggcctcccacattattcctgataccacacctgacccccatgactgtatctctctgatccacctgatattcaccccatttccccatatttccttctttgctgttcctcaccctgatcacgcttgatttattgatggcagttccaccaggcctaatcgccacacaccagcaaaggcaggctatgctatagtacaagccactagcccacctctcagaacctctcatttcctttccatcatggaaatctatcctcaaggaaataacttctcagtgttccatctgctattctactactcagggattattcaggccccctcccttccctacatatcaatctcgaggatttgcccccgcccaggactggcaaattagctttactcaacatgccccgagtcaggaaactaaaataactcttagtctaaatagaaactttcactgaataagtaaaggcctttcctacagggtctgagaaggccaccgtagtcatttcttcccttctgtcagacgtaattcctcagtttagccttcctacctctatacagtctgataacagaccagcctttatcagtcaaatcagccaagcagtttttcaggctcttagtattcagtgaaacctttatatcccttatggtcctccgtcttcaggaaaaatagaacggacaaaaggtcttttaaaaacacacctcaccaagctcagccaccaacttaaaaaatactggacaatacttttaccactttcccttctcagaagtcagacctgtcctcagaatgctacaaggtacagcccatttaagctcctgtatagatgctcctttttattaggccccagtctcattcaacaccagaccaacttagactgtgccccaaaaaaaaactttggtggtctcttcacagggacgcgcatgaaaataagtactacaaagaagaagcacacagtggtatgagaacaaatagtagatgaaactaatcttattttgggcaaggatcagacaggcttcattgaaaaagtgacatttgagcaatacttttaaggataaataagaaataaccagatcaaaagagcagaaggggagggtattccatgcaaatggatcatgtggaaagaaaggcctagaggtggaaaagaacatatatcttctgagagaccaaaaggcagcctgtgtgactggagggcagagagtgaaggaacaaatggctcaggatgtggctgaaaaaggcaaaagtgatcattagctgtgttaaggatttgatctaataattgcaaggttctaagcaaggaggaaaatgtcctaataaggtctgcattagtaagaatcacttttgccaatggatggagtacagattgaaagcaggtaaggggagaaactgacagaggactccttctcctggagttgggaaaccaggacagtgagaactaagctctgatttttttcttatcttgcccaaattcttatctaaggggtctggggagtcatgccctacaaaccacatattctcatcagatgggttttatttaaccctatatattgtgacttaccttccaatttgactccggcataacattatttgacaaagaggaagataaaaatattttaccccaaaatatgtttctttgccatattttgaaatggccctgcaaagccgtcctttgtggtgaaaatttgcagtctctattcacatagctagatcttcttccaggccctcccaatcctaaagagattaaatgagagtctagcaccttttaaagatctgaacaggaagcatttgtcatctgttgtctctaatggcaaccactatgagacttcaaaagaaacttggtcttcacaatcttttttcttaacctgaacatttcctttctattgattgcaggtctttagacaaactcaaccaattgtcaaccagaaaatgtttaaatttacctatagcctggaagcacgcccccacccccctttaaattcttctgcctttctggaccaaaccaatgtatttctcaaatgtatttgattgctgtctcatgtctccctaaaatgtataaaaccaagctgcaccctgaccaccttaggcatatgttctcaggacctcccatgggctgtgtcacaggccatgggcactcatatttggttcagaataaatctcttcaaatattttacagagtttgaaacttttcattgataacaattgtccagatgagagatgatgtggcttaggttggcagaaaataatgaagacaggagtacataggagaaagatattcaggaggtgcaatctacagagctgggagcaaggagaaagaggtatcaaggatgactctcagattctgggctgagcaactaaatagatgacagtacactactctgagatatgccttggaggaaggagaacactttgcctagctggcatatttactccatgttccagcagaaaaacctttttgactcaaccactgtgaggactccatccttggcctagtgatttgcatcaattttagaggtaaagtatcattctcattcaggaaggtatctgaattggtcaatgcaagctcaaatgacattccatgggaagacaaatgcccatgtagattacagaccaaggggcttttctttaaaaatgatattaattgggtggttgtagcattcatgttaccacccataagcaacccacctctgttcagcctttctgcagttgtgccaccaggtttcccaacccaacggcacctgattttcagcactgatgctcattaatagagagtgcagaaggcaccagtgatgagcccaagtgtttctctaagcctcacacagtctgttcaatttagaatatctgccctccataactgatctggtgatctgccaggccatctgagggcccacagaggagaaggcataagaggtttcaaaaaaatggactgtgcagagctcaatgtttaacagcccaatgactctgtgagacagtctatcaagaacaagttgagcaatctttgcctgaacggaatgatagcagggcccttcaaagaggtacttgttcccataaggcaagataagatcatttcctttaagcactattttattgatgagtcaaaaagagaacttgacctggccccaagcatggatttttacagcatcaaattcctacatacgtagcatgtctaaataaagaaaattcttttatccaacaaatatttatgagaaaatggaaaattaaatgttcaagagtaactcatgtctaagcaacatggccatcattctgcagacctttcattaattacaataatgccccatggtttctagaggactactccatgtgaggctctgtctcccatctctcactgtctccctctgtagcctcaggttgtcagccttttgaactcccttctctggctttctggttttgatttacctcttggctcttaactccaaatgcttttataaaatcagagttcctccacaatttcaaaagcaagatttccctatgatcctcagcttcttaaagctcttccagctgagccacacccaggaacaagctctgaatagctcaccagtagcctttgaacctagcattattttatctggtagtgtgcacagatatacatagacatatacatgagcactgctgctcccatacacgctccttccaatcaatcacctttctcacaggtcacacatgtcaggctcatattctccagggaagtagaacttgtggtaccatgctctcaccaactcatctaactagacccagatgtgcctaaggtaccagaccatgtatcttgggataaatcttaggatgtgaagagtcaatcaatcactttagcagtgatagccaaagatcccactactgctaatggtggggcagaagagggaatctcctctgaagcagttcctgggccagtgacaatgctaggacaagacagacaatcctagtatatggcagacagaccttaaggtaacccctgattattcccatctcctggtgttcatgcctttgtataatctcttctctgagtataaatggtaccagtgatttgcttcaaaccatacagaatgtaacctacagaatgggagtcatggaatgtcattcccatgattaccttgttgtataggactccaccatagcagactagaaggagggattctcctttatggcttgatgaagtaaacagccatgttgaggaagcccttgtgacaaggaaggtcaagtggcccccagcccacagtcaggaacaaaagccaaagaccttcagtcatacagccacaaggaaattaattctgccataaaactgaataggattggaaatagtttcttccccatccaagcctccagaagaaacctcagccctagacaacattttgatttcagccttgtgagaccctgatcagagggcccagttaagctgtgtccagaccttcgacacacagacactgtgagataataaatgtgtgttgttttaagctgttaaatgtctgataatttgttatgcagtgatagaaaactaatacaaaaggcctagaatcaagggcttatggaaaacaaggagttcagaattagtcagtccagactgacttcaggctgtgtgggagaggggacaggtggaaggagcaatggtgggtagaagcataagaaaagtcagagctggaaaaaccctaaacatcagcgcaaaggaaacacctcagtctgccatcccaagctcttgctgtcttcacccctgcttcctagctttggttcaaatatgcatacgttgtatcctccattctattcattcaacccagaaatcctgagcacttctcatgtgccaagtccttcttagatcctaagaggaggagacatcagaaagtcaaggtcattgtttcttaggggttcagggaatgatcttggctcccaaagggaactgattgagacaggatgcttgtttaaaatgcaatctcccgggccctaccagcagagattctcagtaggtaggtctcagtcagggtacaggcattcatactgtaaacacacgtctcagctgattcttatgcaggtagtccagagtcaatacattaagattaaacactgacctatagggccatctgtgggtttccaatagaagaatgacaagatatagcttacattttaagaggctcgttttggctgctgcatggaaaatgaactgatggggataagggtggaagcatgggacaagcaggagctatgaccatggtacaggagagaaaatagtggctggaccaggatagaatcaacaaggttagagagaaacagatggatataggccatatgacagaggtggagccaacagaacttgctgttgagttgaatgtgaggagtgagagggggaagaactgaggatgatgccattattatgattataactaccaaagttacaagtctattgtagtcatcccatagtacaatacttatgaaagggaacaggtaaatacaaaatcaatttttcccatcataataatttaagtaactgattgcaacacattgatttccttaaatcaatagctgtgtccatcatcatgactgaatcaattgtttaaatatcattcctcagacaaaataccttgtttatgaagtgtatgacttctttcagagaagtctacttcaaattgtttcaaactgttcataaaatgtttcaagaagggatcataaaactctaaaggctttcaaactggataaggatgccctcttttctaagaagatgagaaaacaagtacaaaagagttaagtatgcacacaattgccatagaaacatttcctgagtggtgtagactgatttgggaagcaataatttctgttgggtacctactttgtatgtgtgtgtgtttaaaaaaaatttaatctcacttaatctttataatgaccctgtgaggtaaagaccattattatccccattttattctcagtacttcataaaggtggcagaatgtcaaggaattattaaacaaataataacttttacctcacctctcccatccaaataaattccaattaattaaaaagttacattttggaaataaatctattaaacagtacatcaaaatataggtaatgtcagatcatggggtggagaaaaagtttctatacatgaaaaaaaggtcatttgtttcttaagtttttcttatggaatgtttaggtgcagatattttaaatatatatctgtagtcaaatttaatagtgtttttcaaatgcttcttcaaagtgggaaaatatacagccactataacacagagctaataaactctttactgtgtggtggctgcttcagtgtcagactgcttcaagcatgttggccacttgctagctgtatgacttggagcaaattattctaacttccccgttcctattttcagcatctgtaaaatgggaataataatagtacctacctatttgcattttatgagtatttaaaaagttaataaatataacatgcttagaactgggcctaccatgccataaatgttcaatgaatgttatctattagtctttttttattatgaaaattactactacaatgcattaagagaataatcacaatctccaaagaaaaataagcatacctcataagaaataatttacaactaaaaaatataaatgaccaataaacaattctaaatgttcaaccacactagtaatagaagaactggaaatttaaaaagtaagtaatatttttcacctatcaattagacaaaaaagaacatttaattataatattctggattggcacacacctatagaaacattcacctatactgctggccaaagtgaaaactggtacaatcattcttaaaagcaatttaggagtaagaacctatacccctacaaatgaccaggccctttggctgaatggcctgacatctaggaatccagtctaaggaacttattacataaacaaatattcatgtgcaaggaagtccactgtggcagtttttccaaaaatttgaaaacagccaaatgttcaactgtagaaaaagatattatggtaccgccatacatgagaatagtacgttgctgctaaaaatcacattttcaaaaagtatttcatgatacatagagatattcaagatacagtgagtcaaagaagcagtatacaaaccagtctgatcccatgcatggatgcacacctgtgtgtacaaaatattctgaaagaaaatacgctgtaacatcaactatggttatcgctgagaggtgagatcaagagtaatttttattttcttctttatgcttatctttaacacatttcacacaataatcatgtattattttatcaaggaaaacataattaaaataaatttgtgtttggtgctaggatatttggaatcttaagaaattccaggaaaccagaacaggtgaaactttattagataaagttttcttctttgtagtaagtaatatgtttaactgatcttagttccaagatcatcagaggttatagagggagacttgacactgacttctccttggtgatcacatcttctctggaaccagggaaaaagaagggggatcttcctggaagtagttttttttgcatggcaactttcttccaggcttctaggcttttcctcctgtctgcatgctcacttcctttctaccatgttgtaggtagtgtgtagccctttcccaatctctctagaaaaaaaaaaatctgaactaggatgctgagaagcttactcttgcctttatgttgagattattaaatttgttctttgctatgtttgggggttggtacttggatctgatatcttggctgttcctgatcttagctctgtctgctcgatccagggagtctgtaccttgagtgatgtcccttggaataacagaaacattattgctatggtttgaatgttcctctccaaaatttaggtgttgccaatgtaatagtgttaagaggtggggtctttaagaggtgtttgggccatgaagagtaatccttcataaaagagattaaggctcttacaaaagaggcttcatgcagcattcactttgcttggctttttgccttcttttctccagatgatgcagcaaaaaggcatcatcttggaagcagatggcagccctcaccagacaactggacctggaggtatctttctcttggacttcctagcctccagaacggtgggaaaatataatacatttctgttctttataaattaccccatctcatatattttgttatagcaacacaaacgaaccaggcaactatttttctatggtttctctcggcaaagaggtagccatttggctacttggtaaggacccagattctgttttcaacattaactatatattttcactccctcagggatccttctagactaggcaaagccttgggccaggctgggactagggcagcataagtgtggcacctactggctccttgaattgtatgctctaggtgcttcacttaccacacacatcctagtccctgccctgcctgaaacataagactaacatttatccctaacaaaaaatgttcaaaggtttaaagttagaaaaacattgatggaagacagctattttgtttccttttttcaactttattgaggtataaacattatatatattcaagggtacattgtaatgttttgatatacaggcatatctcatctgcacttcacagatattgcatttttcacaaattaaaggtctgtggcaactctacatccaggaagtccatcagcaccatttttccaacagtatgcctcacttttcatctctgtgtcacattttggtaattctcacaatatttcagactttttattattatatctgtgatgagttatctttgatgttactattgtaactgttttggggcactgcaaaccatgcccaaagaagttggcaaaacttattgataaataatatgtgtgttcagactcctccactgaccagctttttccccatctctctccttctactcaggcctccctgtaccctgagacatgcgatattgaaattgggccaattaataaccctacagtggcctctaagtgtttaagtgaagagaagaatcatacatctctcactttaaatcaaaagctagaaatgattaagtttagtgaggaagacatgttgaaagctgagtgatagagtttagatatgtgtccccaccaaaatcttatgttgaattataatccccagtgctggaggtggggcctggtaggaggtgtttggatcatgggggtggatcactcatggcttggtgctgtcttcacaagagtgagtgagttttcataagatctggtcatttaaaagtgtgtggcacctccaccccaactctctctcacttgtttccgctttcaccatctgatgtgcctgctcccccttcacctccttccataactgtaagcttctcaaggcctccccagaagtcaagcagatgccagcaccatgcttcctgtaaagcctgtagaactgagtcaattaaaactcttttctttataaattatccagcctcaggtatctctttatagcaatgcaagaattgcctaatacacagaaataagtcaaaagctaggcctcttgtgtcagttagccaagttgtgaatgcaaaagaaaagttcttgaaggaaattaaaagtgcacacatgaatgataagaaagcaaaatagccttattgctgatatggagacagttttagtgacttggatagaagttcaaaccactcacaacattcccttaagccaaagctcaatctagagtaaggctctaactctcttcaattctattagggctgagagaggtaaggaagctgcagaagaaaagtctgaagctcacagatgtgggttcatgaggtttaagaaaagaagaagacatctccatagcataaaattgcaaagtgaagcagtaagtgcagatggagatgctgcagccaagttattcagaagatcctgcttagataattaatgaaagtggcttcattaaacaatagactttaaatgtaggtaaaacagcctaatattggctacttgcccatttcacagatggggaactcagacatagagaggttaagtaatttgcccaagaatgcacagctacttagtagcagagccaggatttgggatgcaggcagtctgatcccagagcctgtatgtctaaccactttctctactgccttgtactataaacacttgctattggctttccactacagataaagcatggaagggcaaattatagccattagagagaatagaaatgctataagccttgctgttggaaatgcaaaatgcaacccctttatggagaaaatttggtaatatttagcaaaagtatgtgtatttgccttttgacctgacaataccaattctatgaatcgatcccaccgatatactggccaaaatatgaaaacacatatatacaaagctattcattacagaataatttgtaacagcaaaagtctagtaacagtgcaaacgttcaataggggatcagttgaacaaactacagcgcatctacacaacggagcactatgcagctgttaaatgaggaagagctctataaataaataaagtcagtggagagaaatttgtggaggtaatagataagtttacggccttgactgtggtggtgatgaactaagtaggtgtgtactcgtctccaaactcatcaagttgcatatattaaatatgttcagcttttaaaacatgaagaagatctcaatatactgctgtaaagtgacttccaggaaattttgttaagctaaaataaggtgtagaaaaatgctaacatcattgtgtcattgatccaagaatagagggatgcaaatataatatatgaatattcttctattaaaacattaaacaatagaaggatgaaacttaaaattttttgaaatggttgcctctagagttggatggaaacaaggtagagaggaaagagatagaagctagacttattcgaatatatactggcttgtagatttgactttggaacaatgtaaccatgttacataatcataaaacaacattataaaatagcaaatcctaaaaattgaaagcaaaatgacataaactaatctaaatgtatatgtagttgatgacagagagaaactattccacatgacttctaaacacaggaatttgatagtatatccctagagagatttattttaaggacaaaaataactttaaaaaacgtaaattatttacagtaattatgttggctgtggtagcattagtactgttattctgaaacagttctatttgtaaggtgagataaattgaataagtaattgtgtgatattttaattctatcagtccctgtggccttgaaaactgggattcttagtgtgggagtaagatgatatggatgtaagactgcagttacataaataccctgtagcactgaatttgaattgatatgaactcatgttatatttaatcttaaaaatacatttcctactgttacaatttgtttagaatttgtctagccaatttcccgattttcaccagaaatccacccccatggaaaaaaaaaatacatttctagcatttccactgaaatgctctagaaacactgactgatccaatataaatgtatccccttaaaatgcagattctggccttgaaataccatttcccactaaaagaaatgaaatacccttagagaaatggctaattccagatctgggtcaggaaacgcgccagatgagcatggcatatcttgtcctaccagataacaaggaaactataaaactactagggctgtggcaaaaggactcaggaaataacttactggccaaagatggcacaatttaagtatcaaaaatgactgcaatttaacacatttaatatatttaaatccataattttattataaaaaaatctagttggtccctttttttctgacgatagggaatcaacttattattttgaaaattcataattaaaaggaaagaatcaggtattagatctgtattccccatatgaactatactactgggcaaccaaatcatagatgaaggaaatttatttttatagaagtattctaaccaataagtgaaaatataactagaattagaatatcaccattttgcaatcactaatgaagtgatggatctaaacactgacaaataatgtttgctattataacaaaacctaaagatctacctgctgaaggcgacaaccaacactatatatgacacattacttttgcctcctccaaatcaaatctgaatcagatcaagcctatagatccaactaccaattcatatgaaatacaaaggtcagaggaacatcttaacctataccatggggattcaatcaacaaaatccagattgtgagaacctctacaggaaaaatgttaactttttttcagaaaataaattatgagaacaaaaagatggaagaacttcttatagtttctaaatattctaaaagacaaatcaatcaattataatatatggactttatttggatcctgattcaaaaaagtgtatactgtgtgtgtatatgtgtatataattgaaaatttgaacactgaccaggtatttgataatattaagaaatttctgctatattgatatttgataattgcattttagttatgttataaaatatttcataacttttatcgatacatgctaaaatatgtatggattaaattatacaaagcgtgggatttgcttcaaaataatataggagggaggaagtaggtggagccagagatgcaacaaaactggccctgaatcgataattattgaagctggataatgggtatgtggtggtttttcatactattctctttactcctgtgcatttaaaatctttctaattttaaaaataaaggtcaagctgtctggcattaattggtagacaaagagaaggaaaggtggaggaagaggaagggacactacaatattattctcatcccagaaaatagaaagctaagaaactctttttaaaaatgacaaccatttagtggttgtcaaccaaatagaggtctactatttaaagttacaatgtaactaataagaaatgttattatttaaagtcataatgtaactaatgagagaattaaacaataaaatatccatgaaattgtggaagatatattagttatcaattattgcatgataaattaccccaaaacttatttgctgaaagcaacaaacatttttttgctatttctgagggtcaggaacctgagagcagcttagctcaggggttctggttcagagtctttcaagaagttacaatcaagctgttggccctggctgtcatctgaaggtttgactggagctgggggatgttcttctaagatagcttattcacatggctgtttgcaggaggcctcaattccttacagactgttgactgtaagtctcagttccttgccatgtggacctctccacaggactatttcagtgtcctcaatacatggcagctggcctcagccagtatgagtgatggggggcagggagggagtgaaagagaccaaggtagaatctacaatgtcttttataacctaacctcagaagtggcataccatcacttcaaccatatgatactggtcatgcagctcaactatggaccctggtacaatatgggagggaattatacaaggatgtgaataataggaggtggagataattgagggccatcttggaagttgaccacctccaagaagtgaaaggtagtatccataagtgattgtctttataaatatataaatagatagatatcacaatatgaatatattctttacagctatagagttagccaacagaaaagcttaaagcaggtataattaaagatgtccactactagggtggggcaggagagggataaggtgtagaaatattgctttttgttttagtcccctttatgctacttgatttttaccatgtttcttcattcaagtgtaattacaaaatcaaagtgacttgaaaggtgctcccttacaaagatagtactaagtaagtatctttgtatatactttcttgatctgaattcagaggtcagcgaggggcaagctcaggagtctggaccataaatggttctagcaaagattaggcaataggttcaggcaacaaggatcgagagccgggctcaacatagagccacagtctttgtgaatctaccactcccaggcacagggaacaaaataccccgactgtcaagctccaataggcatccctcagaggccaacgtggcccgagaaagggtcatctcacaaagctttggatttcagatcaagcccacagtagcctctctaggttaggtgctttataagtgttctcttgaccacctgcgtggaacaaactatgacacaagcaatgaggaaatatttttgagcttcccacacttttttggcaactgccatcaggcccctcaacatctcaagatcaaacatttatgcaagaaaggaatctgtcatcattagaaagatctgcctactggagcatcctgccctttggtcctcatgggtaggagcattaagctttgtttagatttgttcgatggctgacttggatggtgacttagacttacccacatttggactcagggaggagccaagatggcccaataggaacagctctggtctacagctcccagcgtgagcgacacagaagacgggtgatttctgcatttccatctgaggtaccgggttcatctcactagggagtgccagacagtgggtgcaggtcagtgggtgcacgtgcgagccgaagcagggtgaggcattgcctcactcgggaagcgcagggggtcagggagttccctttcctagtcaaagaaaggggtgacagacggcacctggaagatcgggtcattcccacccgaatactgcgcttttctgacgggcttaaaaaacggagcaccaggagattgtgtcccgcacctggctcggagggtcctacgcccacggagtctcgccgattgctagcacaacagtctgagatcaaactgcaaggcagcagcgaagctgggggaggggcgcccgccattgcccaggcttgcttaggtaaacaaagcagccaggaagctcgaactgtgtggagcccaccacagctcaaggaggcctgcctgcctctgtaggctccacctctgggggcagggcacagacaaacaaaaagacagcagtaacctctgcaggcttaagtgtccctgtctgacagctttgaagagagcagtggtaatcccagcacgcagctggagatctgagaaccggcagactgcctcctcatgtgggtccctgacccctgaccccgagcagcctaactgggaggcaccccctagcaggggcagactgacatctcacacgcccgggtactccaacagacctgcagctgagggtcctgtctgttagaaggaaaactaacaaacagaaaggacacccacaccaaaaacctatctgtacgtcaccatcatcaaaggccaaaagtagataaaaccacaaagatggggaaaaaacagagcagaaaaactggaaactctaaaatgcagagtgcctctcctcctccaaaggaacgcagttcctcaccagcaatggaacaaagctggatggagaatgactgacaagctgagagaagaaggcttcagacgatcaaattactccgagctacgggaggacattcaaaccaaaggcaaagaagttgaaaactttgaaaaaaatttagaagaatgtataactagaataaccaatacagagaagtgcttaaaggagctgatggagctgaaaaccaaggctcgataagtacgtgaagaatgcagaagcctcaggagccaatgcgatcaactggaagaaatggtatcagcgatggaagatgaaatgaatgaaatgaagcaagaagggaagtttagagaaaaaagaataaaaagaaacgagcaaagcctccaagaaatatgggattatgtgaaaagaccaaatctacgtctgattggtgtgcctaaaagtgacggggagaatggaaacaagttggaaaacactctgcaggatattatccaggagaacttccccaatctagcaaggcaggccaacgttcagattcaggaaatacagagaacgccacaaagatactccttgagaagggcaactccaagacacataattgtcagattcaccaaagttgaaatgaaggaaaaaatgttaagggcagccagagagaaaggtcgggttaccctcaaagggaagcccatcagactaacagcagatctcttggcagaaactctacaagccagaagagagtgggggccaatattcaacattcttaaagaaaagaattttcaacccagaatttcatatccagccaaactaagcttcataagtgaaggagaaataaaatactttacagataagcaaatgctgagagattttgtcaccaccaggcctgccctaaaagagcgcctgaaggaagcactaaacatggaaaggaacaagtggtaccagccactgcaaaaacaggccaaatcgtaaagaccactgatgctaggaagaaacttcatcaactaacaagcaaaatcaccagctaacatcgtaatgacaggatcaaattcacacataacaatattaaccttaaatgtaaatgggctaaatgctccaattaaaagacacagactggcaaattggataaagagtcaagacccatcagtgtgctgtattcaggaaacccatctcatgtgcagagacacacataggctcaaaataaagggatggaggaagatctaccaagcaaatggaaaacaaaaaaaggcaggggttgcaatcctagtctctgataaaacagactttaaaccaacaaagatcaaaagagacaaagaaggccattacatcatggtaaagggatcaattcaacaagaagagctaactatcctaaatatatatgcacccaatacaggagcacccagattcataaagcaagtcctgagtgacctacaaagagacttagactcccacacaataataatgggagactttaacaccccactgtcaatattagacagatcaatgagacagaaagtaaacaaggatacccaggaatagaacccagctctgcaccaagcagacgtaatagacatctacagaactctccaccccaaatcaacagaatatacatttttttcagcaccacaccacacctattccaaaattgaccacatagttggaagtaaagctctcctcagcaaatgtaaaagaacagaaattataacaaactatctctcagaccacagtgcaatcaaactagaactcaggattaagaatctcactcaaaactgctcaactacatggaaactgaacaatctgctcctgaatgactactgggtacataacgaaatgaaggcagaagtaaagatgttctttgaaaccaacgagaacaaagacacaacataccagaatctctgggacgcattcaaagcagtgtgtagagggaaatttatagcactacatgcccataagagaaagcaggaaagatccaaaattgacaccctaacatcacaattaaaagaactagaaaagcaagagcaaacacattcaaaagctagcagaaggcaagaaataactaaaatcagagcagaactgaaggaaatagagaccaaaaaaaacccttcaaaaaattaatgaatccaggagctggtattttgaaaggatcaacaaaattgagagaccactagcaagactaataaagaaaaaaagagagaagaatcaaatagacacaataaaaaatgataaaggggatatcaccaccgatcccacagaaatacaaactaccatcagagaatactacaaacacctctacgcaaataaactagaaaatctagaagaaatggatacattcctcgacacatacactctcccaagactaaaccaggaagaagttgaatctctgaatagaccaataacaggatctgaaattgtggcaataatcaatagcttaccaaccaaaaagagtccaggaccagatggattcacagccgaattctaccagaggtacaaggaggaactggtaccattccttctgaaactattccaatcaatagaaaaagagggaatcctccctaactcattttatgaggccagcatcatcctgataccaaagccgggcagagacacaaccaaaaaagagaattttagaccaatatccttgatgaacattgatgcaaaaatcctcaataaaatactggcaaaccgaatccagcagcacatcaaaaagcttatccaccatgatcaagtgggcttcatccctgggatgcaaggctggttcaatatacgcaaatcaataaatgtaatacagcatataaacagaaccaaagacaaaaaccacatgattatctcaacagatgcagaaaaggcctttgacaaaattcaccaacccttcatgctaaaaactctcaataaattaggtattgatgggacgtatttcaaaataataacagctatctatgacaaacccacagccaatatcatactgaatgggcaaaaactggaagcattccctttgaaaactggcacaagacagggatgccctctctcaccactcctattcaacatagtgttggaagttctggccagggcaattaggcaggaggaaataaaaggcattcatttaggaaaagaggaagtcaaattgtccctgtctgcagacgacatgatagtatatctagaaaaccccactgtctcagcccaaaatctccttaaactgataagcaacttcagcaaagtctcaggatacaaaatcaatgtacaaaaatcacaagcattcttatacaccaacaacagacaaacagagagccaaatcatgagtgaactcccatccacaattgcttcaaagagaataaaatacctaggaatccaacttacaagggatgtgaaggacctcttcaaggagaactacaaaccactgctcaaggaaataaaagaggatacaaacaaatggaagaacattccatgctcatgggtaggaagaatcaatatcgtgaaaatggccatgctgcccaaggtaatttacagattcaacgccatccccatcaagctaccaatgactttcttcacagaattggaaaaaactactttaaagttcatatggaaccaaaaaagagcccgcatcgccaagtgaatcctaagccaaaagaacaaagctggaggcatcacactacctgacttcaaactatactacaaggctacagtaaccaaaacagcatggtactggtaccaaaacagagatatagatcaatgtaacagaatagagccctcagaaataacgccgcatatctacaactatctgatctttgacaaacctgagaaaaacaagcaatggggaaaggattccctatttaataaatggtgctgggaaaactggctagccatatgtagaaagctgaaactggatcccttccttacaccttatacaaaaatcaattcaagatggattaaagacttaaacgttagacctaaaaccataaaaaccctagaagaaaacctaggcaataccattcaggacataggcatgggcaaggacttcatgtctaaaacaccaaaagcaatggcaacaaaagccaaaattgacaaatgggatctaattaaactaaagagcttctgcacagcaaaagaaactaccatcagagtgaacaggcaacctacaaaatgggagaaaattttcgcaacctactcatctgacaaagggctaatatccagaatctacaatgaactcaaacaaatttacaagaaaaaacaaacaaccccatcaaaaagtgggcgaaggacatgaacagacacttctcaaaagaagacatttatgcagccaaaaaacacatgaaaaaatgctcaccatcactggccatcagagaaatgcaaatcaaaaccacaatgagataccatctcacaccagttagaatggcaatcattaaaaagtcaggaaacaacaggtgctggagaggatgtggagaaataggaacacttttacactgttggtgggactgtaaactagttcaaccattgtggaagtcagtgtggcgattcctcagggatctagaactagaaataccatttgacccagccatcccattactgggtatatacccaaaggactataaatcattctgctataaagacacatgcacacgtatgtttattgtggcattattcacaatagcaaagacttggagccaacccaaatgtccaacaatgatagactggattaagaaaatgtggcacatatacaccatggaatactgtgcagccataaaaaatgatgagttcatgtcctttgtagggacatggatgaaattggaaatcatcattctcagtaaactatcgcaagaacaaaaaaccaaacaccgcatattctcactcataggtgggaattgaacaatgagaacacatggacacaggaaggggaacatcacactctggggactgtggtggggtcgggggaggggggagggatagcattgggagatatacctaatgctagatgacgagttggtgggtgcagcgcaccagcatggcacatgtatacatatgtaactaacctgcacattgtgcatatgtaccctaaaacttaaagtataataataataaataaaaaatttaaaaaaagaaagacttacccacatttcaaattcactgggctttatagacttaaaacttctgaaggtactcaggaccctactctgatagaccttcaatgtcctcccaccactccacctcccatcctcagtgatctacagctgctcagaagaacctcttgttcctaaaacaatgaagatacacttttctaaaagagtctctgcacttaaaagactaatctaaaacacagtataatacggctatgagtatttaatattattatggttgtcagttgatttaaatattttaatgagtggctttattatgcttctgtcctattatgcttctgtcctaaggctttaggcataatacaattgtaaaactccaatgtccttgtagccatatttctttggcattttagtagtttgtggaaaaggtccaaatcatgattgttatggctcacaccaacagatgacatcagcagtgattttgtacaaagaaccttgaactaggtatcaggagccatgcatttaaattccatatcaaaacatcatgttgtataccttcagtatatgcactttttattcatcatttatacctcaataaagctggagaaaataaataatatatacatgatgaaatacagaactaaacaaagggtataactatgttaataattgaaaaaatgatggataaaaagtaaaaattacagctgagtaaaaaaattaataaattccagatctgccacttaccagctaggtgaccttgcatgagcttcttagccagtgtgagcctatgttttgttatctgtaaaattaagataatgagcctgactaaaatagttttttgtgaatcaaactggataacatgtgaacatattttctttctttcttttttttttttttttgagacagagtctcgctctgtcacccaggctggagtgcagtggcactatctctgctcactgcaacctccgcctcccaggttcaagcaattttcctgcctcagcctcctgagtagttgggattacaggcatgcactaccacacccggctaatttttttttgtctttttagtagggatggggtttcaccatattggtcaggctggcctaaaactcctggccttgtgatctgcccacctcggcctcccaaaatgctgggattgcaggtgtgagccactgtgcccagccgtgaacatattttctaaactataaagtgaacggcacacagaaaagatttacactcctttgtacaagtgaaaaaatatgtagtaatttgaaaagctaaattctaagttctttcattcacaaagacatactgagcttccaccattcacctaggaggaactctccacccctttttgtctccaagcctgcttgtatcagctgtgtctgtgagcaacacagaggagccaccccatacccatagtgcctgcacagtgtctggcacaaaggacacctgatacacacttacttcactggaatgaacagccctccctcccaccaaaattctattaagcctctacttccagggctctctgaaagctgctgcatcccatagtccagcgagatcacatgacttactgcatggcctcctgcagctagcctttaccttgagtctatgaacatcagcaatggcatctgaccacaggctcccttggcttggatggtaacttggaattacccacaattcaaatttgattggctttatagacttaaaacttctgctctttttattagaatttgacctcagtatggatcataggtgcttagtttcttcctctcttaatttttagagattaattactatagtaggaattctgttgctttctaagatatttattctttttagtttcatccagaactggaaagatatcaaggcgacaagacttgtgtatcagtcacagccagagtcattggcagatgggatgataggtaaaatgagactggacccagtttgggccaacaagtggcacaggaattagcaaagggtgacaaagattatattgctagtagaattgggcaaggttcaaggaagccagaagcagcaagttcagtagaggccaagagttctgtttacctgctaagagaggagcagacaaaggcactcagatatcctggcaaacttcttgaaagacagagctggttagactgaggatttgttctgattgctgcctctgagcttcactgttagacactcggcattcagttctgctggatcttcaaccccttcctccaacccccatcacttttagagctggtgttggaccaactaagcccaaagacataaaacgaaagggcaaagatatatctacaaatacaaataaacacgattggtactattactatcaaagtagagtttaaggcaacagtattaagcagaagagagagattttatataaataaaacacacagttcagcaaaaagtagtaagcattgtgaatcttaaaataccaaagtatcctgcatcgatttttttttttttttgagacagggtctcgctctgtcgcccaggctggggtgcagtggcacgatcttggctcactgcaacctctgcctcttgggttcaaatgattctcctgcctcagcctcccgagtaactgggattacaggcacacatcaccatgcctggctaattttcgtatttttagtagagacagagtttcctcatgttggccagactggtctcaaactcatgacctcaggtgatctgcccacctcggcctcccaaagtgctgctgggattacagacatgagccactgtgcccagcccagcttcaaaatttataaagcaaagattatagaacaaagaggaggacatgaaaatggagaggaaaatcggacccacgtggtggagggacttgaatactttggaaggaatctgtactctataggagacaggaaaccaagtaatctctctggtccttggctgtgcctttgattttcctgcttgtgtcaagctctgtctgtgagcaaccccaggaagctaccctgcatccccagtgtcagccacattggacacagaggccacctaggacatacaacttctctagaataaatggaaatgatctccatgaccctgctccccatccaaactaaattcattcttgaagatacatatcacaacccatctcttatatcaagctttcttcccacccagtatccctcatgacctccttctcccaactctgagcccttggaacgatcatcagtaaaactctttgggaaattaatcacaccctgcttgtgatctatcttcttctgtgttatctatttgagctatcgcttgaatcttgccttatcacttcacttttcacaaacttgtttttatctgccagacttagctatatacctcagaggcctgatgtggtctgatattttttgttgttgtttacagcagcatcaccatcctgctagaacaactgcataactgcatatgtagagtgctttctgagaaagcagactctgggacagcgggtggatgggcctgaaaggcaagaggctttctctgataggaacctgctatgatcatacaaggcaggggtaaggagattttcatggttaatactatatgtcacgttgacatatgcccatagcatgctcagatatctgattcaaaacattatttctgggcatgtctgtgagaatgtttctggaagagactggcatttgaattggttgactgagtaaaaaatatggctctccctaatgtgggtgggcattatccaatctgttgagggcctaaataaaacaaaaaagcagaggaagattggatttgtcctccctctgcctgaatgcttgaatgaagaacatcgatcttctcctaacttcggagctcctggttggttctcaggctttcagattcagataggaatctacaccaatggccctccagttatcagaactcccatttataccactggctttcctggggcttcatcttccagacagaagatcatgggacttctcggccttcaaatcacatgagtcaatgccttataataatgataataatttcagatagatagatgatagatagatgatagatagatagatagatagataatctgagacaactgtttcagtcagatacgtgcatttgtgtgtgtgtatatatattctcctatttgttctgtttctttgtgtctctggagaaccctgactgatacagagatggtatttgcttatgctagaaggaaatgacgcaagtaaattctcaggaagaaacagggctgaatggactaaaaggagtaagagagtcaaggatatctctagctgatttggttatgatctgcaaggttccaagcatggtgctgacatccatgacccaagataagccctccataccaaaagagcactattagccaaaggccatttgctcagttggttcaggaccaaatcatccactgcttctgacccatgtagggatggcacaggggaggaggaagggtagttcagcagaggcccctctcatgcaagcattctgcctgtgctcctggcactcccagtgccccaccctgcagattacccaagcccttttcagaccaaaagataaagatccctatggaggagtggaacacccctctggctcccaatatcaaagattagatacagacaagccctgtctagagcccaccagctctagatgccagaccacaaagggctcctcagaaagcatgattctcccccactcccctggtgtgcttagcagcagacacgtggctcaccagtgtaactctacccccaccccaatgcatctaagggcagtccttcctctgctgcctgaatacagccctcagaagctggcttctccacgtgctccaggcagaagtaatggttccctcaaatcattcagtttgtacttctctgtgaaaggctgtatggaagagggaaaatcacagggacttgagagtcagagaaacctgggttagtatctttgtgaccctgagcaaatcatctcccatatctgggctacatacccaacaggttgttgccagggttaaatggcacctagcacaagtaagcacccaagaagcagtaacagttattgctatcactctgtgctgtgataaagttaatcaaggaaaagttcagaaagggaagcaatctgtgaatgtctgggagtactgaaacaggcttgcctaaggcctgagcagagccttagcttagtctgcctcttgcacaggtgaggcgcataattgcccaaaacacccctacaggagacccagcaggggttgaactccccttcctgctggccaagcctggagcctgcatcttatttgcatactgattaacactagttaggagaaatgcatgatcatgatccttgtcctgtaaaggctgggtagaaacaaagtcaatgtgaagcagaatagtctttcagccaaatggatatgcttactccctgaagcaacaacggaggagggctttgaactctgctgggagcttgctagcatctcaggaaattctcttgcagggactgaaattctcttgcaggaactgagtcaatgagccatgccccttctgtgtgtacggtttctagcttttttgttttttgttttttgttttttttggagacggagtctcgctctgtcgccaggctggagtgcagtggtgcgatctcggctcactgcagcttccacttcccgggttcaagcgattctcctgcctcagcctcccgagtatctgggagtacaggcacgtgccaccacgcccagctaacttttgtatttttagtagagatggggtttcaacatgttggccaggatggtctctatctcttgacctcgtaatctgcccaccttggcctcccaaagtgctgggattacaggcgtcagccacagtgcccagccttctaaggcatttttagagccattttctcatctggtcctctaaataaccctgtgaggtaggtatgaataaacccatttcacagagcaagagactgcaggctcagaaggataaagagattaatctaaggtcactcagatatatatacacacacacacacatacacgcggttttcaagttcaaattcaaacaagtctgtctggagcctccagaactcaggctttctaccccactccactacctcttagtacttccttctctcttctttactaccctgccaaaaaagtctatcattctctaatttattcttcttttctgtggctcctgctcacctaggagtttatagccacagaatctagccccctcaggccagaaaaatgaagatacctgcaagcagtgacccggcagcttctgttttcaacagtttaatttcaaaggaaatggacctcacttaactaaatttccttttctattttttctagctattaaagaacttgcatatctaataaatatttaataggaatttgcctccagctgaattcaggcccctcagcatctcattactatgtcttagaatagtatcctcattgtcacttgcttaattatgctcagaaagagttgaattgtgtggctgttgggatcagaaagtgattaaattcacttggcaagactttggatatctcattatgatcctcatttagcatttctaatggagttattttttttttccccaatactgacttgggaaaggcttgttccgtggcgctaactatttccctgagcctcgcacaacttcatactgtgccagaaaagatcagaagttacttcacacctcatttgcactcccaagaaaaacagccatccaaaggacaatgatataaggccctggagaaaggggtggggaagttagactttgagacactttccagatcactcagtctagtcctgtctgatggttgaatcccttttccagcagcagtatcaaaggctagtccaggtctggcttggattcctccaatatcaggaaattcacttggccttaaggcagcctgctctctctttaaaggactcagtaaaaccttcattgctttcaatcattggtcctcacgctgttctccaggtcatccctggctttgtttgagaataaattatatctctcttttagaagatcctttggtgatttggagattcattctaatggcaacttgaattttttcttctatcagttaagtatccccatttccttcctccatttctcatatgatgtgatttccagtccctttctcaactaaataatactctcttatctttcttcttcccccgcttccttcctcccttttcttcttgagtgcctaccctgctaagtaaaagctataaaggtagattctggacatagagcagtgaatatgtcaaatatgacccctgccctcccttccagggcttagaatctaagcggagagagaaacaagcacacagacctctacaatggtgatgtaagcagtatgtgagtaacaagaggtggagaagtatctgacatttattggaagttgactttgtgccctgccccacgcaaagtactttctattatttcacttattcttcacaataccccacttcttcagaggaggaaactgaagcacacagaagttaagcaattttcccaagatcgcacaataagtagtagatcgaggatataaacccatagaatacactgttatcagactctttgaatatagagcccagattttgattcagtacctcaagagtcctctgatcagtcaagaaagcacagcacttcacgtctgaatactctttctttgcctccatctgaactcctctttcttgtcttgggagcatgacccttccaaatgctggttcctttaaatgtgttgataacaaaacccggagattctgcttgcctattgctcatctcaagcaacccctctgagccctcttccaccctgcccctccccagctttccctcacagaagaggtcctgctaggcccctgcacctaggcccacatgcctgcaggcccagttttgaccaaaaaggattgaatcctggaagggtggcctaaaggagggttccgactgatagccagatgtttcccaacatccctgggccttatttttggaaaaacttgtttcttctgcacatgaatgaaatagatacgacagtgatagtcacaggttccagcccaaacaaactgtgtattctactcatgtctcttctttggttgaacctttctgataaaaggttgacatgccaggggtgaggccagtaggcaaacaagtttaaaaaggtgtactctgacttccaaggagaggtgagatggagcagggaatctccctcttatgggtctaggagcccccaagttggaaataaaggaaaatcttgagctccttcaagggaaattctaggcacctagttagccctgagaagtaaataagcaactagataagcaagaaggtaatagcagcttaaaacactagccaaggaagttagagtcaggaagtatttgactcccctctggtaagatggaactgaagactgaactctgaccactattctttgttctaaatttcttcctgaggagcctggagggagtcacacccatgagccagagctatcattattttcggctgatcccaaatttttaaagaatgcttctcttccttaaccaattgcaaatcagaaaatcttttactctacctatgacctataagctgctgcttcaaaaacagcccacattgccaggtcaatcctaagccaaaagaacaaagctggaggcatcacgctacctgacttcaaactatgctacaaggctacagtaagcaaaacagcatggtactggtaccaaaacagagatatagaccaatggaacagaacagagccctcagaaataatgccacatatctacaactatctgatctttgacaaacctgagaaaaacaagaaatgaggaaaggattccctatttaataaatggtgctgggaaaactggctagccatatgtagaaagctgaaactggatcctttccttacaccttatacaaaaatcaattcaagatggattaaagacttaaacgttagacctaaaaccataaaaaccctagaagaaaacctaggcaataccattcaggacataggcatgggcaaggacttcatgtcaaaacaccaaaagcaatggcaacaaaagccaaaattgaccaatggtatctaattaaactaaagagcttctgcatggcaaaagaaactaccatcagagtgaacagacaacctacagaatgggagaaaatttttgcaatctactcatctgacaaagggctaatatccagaatctacaatgaactcaaacaaatttacaagaaaaaaacaaacaaccctatcaaaaagtgggtgaaggacatgaacagacatttcttaaaagaagacatttatgcagccaacagacacatgaaaaaatgctcttcatcactggccatcagagaaatgcaaatcaaaaccacaatgagataccatctcacaccagttagaatggcaatcattaaaaagtcaggaaacaacaggtgctggagaggatgtggagaaataggaacacttttacactgttggtgggactgtaaactagttcaaccattgtggaagtcagtgtggcgattcctcagggatctagattcagaaataccatttgacccagccatcgcattactgggtatatacccaaaggattataaatcatgctgctataaaggcacatgcacacgtatgtttattgcggcactattcacaatagcaaagacttggaaccaagccaaatgtccaacaatgatagactggattaagaaaatgtggcacatatacaccatggaatactatgcagccataaaaaaggatgagttcatgtcctttgtagggacatggatgaagctggaaaccatcattctcagcaaactatcgcaaggacaaaaaccaaacaccgcatgttctcactcataggtgggaattgagcaatgagaacacatggacacaggaaggggaacatcacactctggggcctgttgtggggtggggggaggggggagggatagcattaggagatatacctaatgttaaatgacgagttaatgggtgcagcacaccaacatggcacatgtacacatatgtaacaaacctgcacgttgtgcccatgtaccctaaaccctaaagtataataataaaaaaaagatatcccaaatctctatgtattgatttgtgattttgcctacaacttctgctttcctgaaatttatccccctttaaaaaactcttgcttgcaagatatcagggaggtctggatttgagcattagctgcctagtccttcttgcttggtgctctgcacataaacatcctcttttctcccactgcaaaccttgatgttaatatctggtcttcatgtgccctttgagcagatcccagttcagttctgaaacagaggctactccttgcatgagaagaatcaatctgaaaactaaaatgggtcaccccagttctgtcaccaagttgcactgtgagcttgaacaagtctcttcccctacctaggtcctttatttcttaaataatgagtggtttaagcaagccaacttccatgggcccctctagctttaagatatgatgggttcaagtccatttattaagaactttctctttcaagaacatctataagtgcctactaagtgcaaatccctgtagagaaggggcaaactcgattctggggaagaattattgaggagccagaggcaatcattgtgatgaaaaatctcagccctccctaagacctcccttttgcccaattggtggctttttgcaagcctagccccatgtccttagaagtaccagtaccaaacagcagggcagaaggaggaagttccaacctcaactataaactggtttctagtacctttcaggctactcccccagtaataagccagctatcttgactctgggactagagctccttctaatttgcttcttcccgagaaaggtaggagaattaaatgcaatccctgacttgccaaactcaaactaagatgacattccaaaaacacatggaaccattgtcagtattcaccactattagggttatcatctgtcctcaaacagaacaggagagcagagtgctgatatttggaaagaaaaggaatgcctcaaagtaatatgaaaaggtatcattgggattggcctgtcagctgagagcacaaagaccaaacaagctggtacccccttgggtgaatatacagagcctggcccacatcccctaagcactaatgatgagcacataattatttcagggttgattagacttaggggtgctcatccatctctcaaaagctccaatggccataagaaagaaaaccaaaaaggctctttactggattaaaataaggaaataaaactgccaaggaacctagacattttgggtccctgagaagccaacttgccattagaaagttgcttgggcaacatggaggcacaactatagatccttcggatggattgtatctatcaggggcttgaatgttttcctgggcacatgaggaagttgaacaaggtgaaacagaggagttcctttatcccccatgtagggcgtgccacaggggtgtgggtcgcttcttagatgccccgctgctcaaacccctagagggagcatgcagatgggcaggtcatggggagcgctttggggctccgtcactaccatagcgtctagggtagactgttaacagctcccgaagccccagtgggtgtgtgtttcagtgtcctctttcagttttgctgtctgcaggtggcttgtgttaatcagctcaattagaccctctgctttatctcaaagacagagggctttctgtatcccggattcttgccctagtgtaccagaaaaattggaccacacatgggcttggaggatgagtgaaaggttttattgagtgatgaaaatagctctcagtgagatggatgaggaggccagaagggagatggagtgggaatgtagtcttctcttggagtcgaaccacccaatgcctggaccctcctccgactgcccccaaccgaattccatgttgccccactgttgatggcctgacggcatctgctggtgtctgtcagtgtgctcttctgctcctctgctcctctcaacgtccagctgcttgtgcatgtgcccgctagggtctcggggtttttataggcacaggatgggggcatggtgggccagagtggttttggaaaatgcaaagtttgggcacaaaaacagaagtgcttgccctcacttaggtccgtggcacaggcccaagggtgaagccatctccagggacactgcccttctctacccagcacttccctgcccccctcctgtatcaaaggcagtcttggatctcctattcagcactgaaaatgcatagaataaccataagttctcaagtttgcaaatcacatcccaggagagttccatctctccctctagactcaaactcccacacatgtcctcttctccaccttcagcatcttgcacaccactttcacttctcagttctctgccttcccaccaatgcagccaccaccacttggctaccaaggctttgaaggcaggctccattaagtagtccttgcttttcccagttctccttcctaggcctccatattttttgtgtagtctttacagtgtaaaaacagccctaagtgctaagttatcccttagtactgccttcgaatctgcttctgctgctttcaagaaaaatgaaacattttaccagacatttgtaactgaatagagtctcttatccaatggccaaaacctcttataacagccacaactgataagcacatagtcctaataaacttgtatatttgaataaagtcgctttgctttcatgacactttcccacaggcttacccatcccaacccagcactaacaaggtgaagaccacaggtgggcagactggcactggaagggtacagtatagaaagtcagaggactagattctagagcctgggctgaccttgattaagtaaatgaccttggataactccttttgctttgctgaacatcactatggccctcttgtcagaatgggcttatggaagacaggtgaccaatggagtttttgctcaaatccattttacactgggcccagtgggttcctgaacctatattgcagttatttccccagatccagatgcatagttggaatagacatattcagcaatggcaaaatccccacatttgttcactgacttttggagtgatggctgttacagtgggaaaagccagatggaagccattaggactgcctctacatagaaaaagagtaaatcaaaatcaacccttgaagggatctcagagattagtgccaccatcaagtacttgaaagatgcacaggtggtaattcccaccacatccccattcagctctactacttgacctgtgtgaaagacagatggatcttacagaattgcagtagacttaaccatgtggtgactcagattagagctgctataccaggtgtgggtttcattgcttgagcaacttaacacatcctctggtacctggtatgcagctattgatccatacagctgttccataactgtccataaggcccaccagaaaaaaatttgctttcagctagcaaggatagcaatgtaccttcactgtcttacctcagggatatatcagctgtccagcactaggtcacaatttagtttgaagggaacttgatcacctttcacttcacacgatatcacactgatccattacattgatgacatgatgctgattaaatctagtgagcaagaaatggcaactagtctagacttattggtaagacatttacatgtcagaaggtagaaaatatatctgactaaaatataggcatcttcttcttcaatgaaatttccaggagtccagtggtgtagggcacatcaagatactctttctaaggtgaaggataagtttttgcatctggcttttcctaacaaaaaagaggcatagtacctagtggacctgtttggatttgggaggcaacatattcttcagttgggtatgtcactctggctcatttactcaatgacctaaaaagctgctacttttgagtgggacccagaacaggagaaggttctgccacaggtccaggttgctgtgcaagctgctctgccatttgggccacatgatccagcaaatccaatggtgtttgaagaggctcctataagtgaattgcagtgcaggcctttgagatttgggagcaaggccctgccatcattcacaggtaactactgtccttttgagagcagctcttgccttgctactgggccttagtaaaaactgaatgcttgaccaagggccaccaagttatcataaaacctgagttgctcatcatgaactggatgtcatctgaccaccaagtcataaagttgggcatgtagagcagcactccatcattaaatggaagtggtgtatatttgatcaggcctcagtaggccctgaaggcacaagtaagctacatcaagaagtaacccaaatgcccaaggtccccactcttgctacactggcttctctctcccagcctgcacctatggcttcatgagggttctctacaatcagctgaaagaggaagagaagactagggcctgggttacagatagttctgcataacgtacagtctctacccaaaagtggatagcttcagcactacagtcccttttggggacattcctgaaggaaagtggtaaagaaaatcttctcaatcggtcaactttgaacaacgcatctgattgtgcactttgcttgaaaggagaaatggcaagatgtgcaattgtatactagttcatgagcaatagccagtggtttggctgactgggcaaggacttgggagaaatgtgattggaaaattagtgccaaagaaacttggagagggagtatgtagacagacctccttgaataagcaaagaacatgaaggtatttgtgtcttatgtggatgcttaccaaagggtgacctcaggagagcaaaactttaataattaagtggataggatgagccgttctgtggatactagcagctgccttccccaacctctcctgtgattgcccgatgggctcatgaacaaagtggccatggtggtagggatggaggttatgcatgagctcaggaacatggtcttctacttaccaaggcccacctggatacaactatgctgagtgctcaatttacaaggagtagataccaacactgagcctctggtaacggtaccattcctgagggtaatcatgaagctatttggtggcaggttgattgcattggacgacttgcatcatggaaggagcagtgttttatccttactggaaaagacacttactctggctatggatttgtcctccctgcatacaaagattctgctataattaccatccatagacttatggaatgtcttattcaccaacatgatattcttcacagcattgtttctgacacaggaactcatttcacagcaaaagaagtgtagcaatgggctcttgctcatggaattcacttgtttaccttgtccccactatcctgaagcagctggcttgataaaatggtggaacggctttttggagattcagttagtgccagctaggtggtattatcttgcaagactagggaatggttctccaaaaggctgtaaactctgaatcagtgtgtaatatgtattggtgtgtctttcacagccaggatttatgggtccaggaatcaaagtgtggaaatgggagtggttccattcactcttactcctagttacccactagaaaacttgttttgagataataattaattttttattttaattttgtggatacatagtaggcgtatatatttatgggttacatgaaatattttgatacattcttgcaatgcgtaacaatcacatcagggtaaatggggtacccatcacctcaagcatttatgctttgtgttacaaacaatccggttatactcttttagttatttaaaaatgtacacttaaattatttttgactatagttaccctgctgtgttagcaaatattaggttttattcattgtttctaactattatctgtgcccgttaaccacctctaccctgtcccatctccccaactaccctttccaacctctggtaaccatcctttttctatctccatgagttcaaatgttttaatatttttgctctcacaagtgtatgggaatatttgaagtttgtctttgtgtgctggattatttcactaaacataatgacctccagtttaatcaatgttgttgcaaatgacaggattttattattttttatggctgaataatactccattgtgtatatgtaccatatttacccattcctgagttgatggacacttaggttgcttccaaatattagctattgtaaatagtgctgcaaaaaaaaacatgagaacgcagatgactcttcaatatattatttcctttcttttgggtatatacttagcagtggtattgctggatcatatggtggctctatttttacttttttgaggaacttccaaagtattctccataatggccgtactaatttacattcccaccaacagtgtacaaaagttctcttttctctacaccctcaccagaatttgttatttcctgtttttggacataagccattttaactggggtgatatgatatctcattgtagtttttatttgcatttatctcattatcaatgatggtgaacaccttttcacatacctgtttgcaatttgtatgtcttcttttgagaaacaactattcttaccttttgcccatttaaaaaattggattattagatttttttttcctatacagttgtttgatatggtttggctgtgtccccacccaaatcttatcttgaattgtagctcccataatcctcatgtgttgtggaagagacctgttgggaggtaattgaatcacagggatgggtttttcccatgttgctctcatgatagtgaataagtctcatgagatctcatggttttataaaagggcagttcccctgaacatgctcccttgcctggcaccatgtaagatgtgtctttgctcctccattgccttctgccatgattgtgaggcctccccagccatgtgatactgtgagtccattaaacctctttttctttacaaatcacccagtctcaggtaagtctttatcagcagtatgagaacagactaatacagtaaattggtactaggtagtggggtgctcctataaagatacctgaaaatgtggaagcaactttggaactgggtaacaggcagaggttggaaaagtttggagggctcagaagaagataagaaaatgtgggaaagtttggaacttcctagatactcgggatggggggttcagaagacaggaagatgtgggaaagtttggaacttcctagagacttgttgaatggcattgaccaaaatgctgacagtgatatgaacaataaggtccaggctgaggtggtctcagaaggagatgagaaacttgttgggaactggagtaaaggtcaatcttgctatacaaagagactggagcattttgccactgccctagagatttgtggaactttgaacttgagagagatgatttagggtatctggcagaagaaatgtctaagttgcaaagtgttcgagagaaagcagagcataaaaatttggaaaatttgcagcctgacaatacaatagaaaagaaaaacccattttgtcaggagaaattcaagcctgctgcagaaatttgcataagtaaagaggatcccactgttagtcaccaagacaatgaggaaaatatctccaggtcatgtcagagacctttgtggcagcccctcacatcacagacccagaggcctaggaggaaaaaatggttttatgggctaggcctagggcccaccctgctgtgtgcagcctagggacttggtgcactcatcccagcctctccagccatggctaaaaggggccaaggtacagcttgggccatggctaaaaggggccaagatacagcttgggccatgactttggagggtgcaagccccaaaccttggcagcttccaagtagtgttgagcccatgtgtaaaaaaaacacagaagtcaagaattgaagtttggaaacctccacctagatttcagaggatgtatggaaatgcctggatgtccaggcagtagtttcctgcaggggcagggccctcatggagaaactctgctagggcagtgcagaaatgaaatgtgtgatcagagtccctacacagagtccccattggggcattgcctagtggagctctgatgagagggccactgtcctccagaccccagaatagtagatccacctacagcttgcactgtgcccctggaaaacccacagacactcaatgccagcctgtgacagcagcccgaagtatggctgtatcctgcaaagccacagggcatgagctgcctaaggccatgggactctacctcttgcatcagtgtgacctggctgtgagacatggagtctaaggagatgattttggaactttaaggtttaatgactgtgctattggatttccgacttgcatggggcctgtagcccctttgttttggccaatttctcccacttagaatgggtatatttacacaatgcctgtcccccgttgtatctaggaagtaactaacttgcttttgattttacaggctcataggtagaaaggagttaccttgtctcagatgagaatttggacttggacttttgagttaatgctagaatcaattaagactttgggggaatgttggtaaggcatgattggtttggaaatgtgaagacatgagatttgggaggggccagtggtgaaatgatatggtttggttgtgtccccacccaaatatcttgaactgtaactcccataatccccatgtgttgtgagagagatctaatgggaggcaaatgcatcatgggggtgggtttttcctgtgctgttcttgtgatggtgaataagtctcatgagatcgggtggttttaaaaaagggcagttccccacacacactctcttgcttgccaccatgtaagatgtgcctttgctcctcctttgctttctgccatgattgtgagacctctttggccatgtgaaactgtgagcccattaaacctctttttctttacaaattactgagtcttggatatgtctttattagcagcatgagaacagactaatacaatatccttatatattctgggttgttttgttttgttttgttttgagacagagttttgttccatcacccaggctggagtgcagcagtgcgatctcagctcactgcaacctccacctcccaggttcaagcgattctcctgcctcagcctcccgagtagctgggactacaggcatctgccaccttgcccaactaatttttgtatttttagtagagatggtgtttctctatgttggctaggatggtcttgaactcctgactttgtgatccgcccgtcttggcctcccaaagtgctaggatgacaggtgtgagccaccaagcccagcttattctggttattaatctcttttcagatggatagtttgcaaatactttctcccattctgtgagttgtctcttcacttttttgattatatcctttatagatagatagattagatagatagatagatagatagatagatagatagatagatagatagatgatagatagatagagatttatcatgagggattggctcacatgattattgagactgagacatcctgtcatttgccatctgcaagctggaagcccaggaatgccagtggtgtacttgatgtaatctcatttgtccatttttgctttggctgcccgtacttgtgaggtattgctcaaaaaattgttgcccagaccaatgttctggagattttcctcaatattttcttgtagtcgtttcatagcttgagtttttagatctaagtatttaatccactttgatttaatttctatatatggtaagagaggggccttgtttcattattctgcatatagatatccagttttcccagcaccatttattgaagagacagtcttttccctagtgtatgttcttgatacctttgtcaaaaatgtgttcactgtagatgtatggatttatttctgggttttctattctgttccccttgtttatgtgtctgtttttgtgccagcagcatgctgttttggttactacagctctgtagtataatttgaagtagataatgtaatttttccagttgtgaccttttgcttaggatagctttgtctattctgagtcttctttgttttcataccaacattaaaattgttttttctatttctgtgaagaatgtcattgatattttgatagaggtttcattgaatctgtagattgctttgggtagtatgcacattttaacaatattgattcttctaatctatgaatatggagtatctttccattttttgtgttctctccaatttcttacatgaacgttttatagttttcattgtagagatctttcactactttggttaattcctagatatttaattttatgtgtggctattgtaaatgaaattgcttctttatttctttttcagattgttcactgctggcatatagaaatcctacttacttttgtatatcaattttgtattctgaaactttaaattatttatcagttctaatagtatttttgtggattctttaggtttttccaaacataagatcatattatctgctaacaataataatttgactttttcttttccactttggatgccttttatttctttctcttgtctgattgctctagctagaatttctagtactgtgtggaataacagtggtgaaggtgggcgtccttgtcttgctccagatcatagaggaaaagctttcagtttttccctatccaggatgatactatctgtgagtttgtcatatatggctttagttatgttgaggtatgttcctactattcccatttttctgagggttattatcaggaagagatgttgaaatttgtcaaatgcttcttcagcatcaattgaaatgatcatatggtttttgtccttcattctgttgatatgatgtatcatattgattgatttgcatatgttgaactatctttgcatccctgggataaatcccatttggtcctgattaatgatctttttaatgtgttattgaattcagttccactggcctagatatgttagttccaaaaggaaggatgcttctaccaggagacacaatgattccatttaattggcaaataagattaccacctttctactttggggtcctcatgcctctgagtcaacaggccaagaagggagttatggtgttggctgcagtgattgagtcacaatgtcaagggggaaattggactatgctccacaatggaagcaaagaagaatatgtctggagtaacagtgatcccttagggtgtctcttagtattatcataccctgcgattaaggttaatggggaaaaaatccaggtaggactatgaatgtcccagatccttcaagaatgaaggtttgggtcatcctgacaggtaaagaaccatgaccagttgaggttgttgctgaagacaaaaggaatccaacatgggtaatagaaaaagggggtaataaataccagctactatcataagaccagttatggaaacaggggctatacttgtcatgagtatttctttcttattttacataaatacatttgtgtgaataaatgtaaacttagtgtgaaaaaaagagaatagggaaatattaagcaaatgtctttgttttgtttcctcttgtattcccttatcatgtaacataagatgtattgagtttgtattagtttttaagtaatgttaatgttacttcatagtatttaagttagaggatatcagaagaagaataaacgtcactcaaggacttcatctcctcttatgggaaagggataagtgtgtattagttgcacagagaacagttgtatcatgttagctgattatgactttgttattgtctttatttggagattttttttttttttttttttttttgaggcagagtttcactcttgttgcccaggctggagtgcaatggcacaatctcggctcatcacaacctccgcctcccgagttcaagcgattctcctgcctcagcctcccgagtagctggaattacagggatgcactaccatgccaggctaattttttgcatttttagtagagacagggtttctccatgttggtcaggctgatcctgaactcctgacctcaggtgatccgccctcctcagcctcccaaagtgctgagattacaggcgtgagccactactcctggcctttatttggagattaagtgtggcttaaggagatgcatacaggtgtgaagttgacaaggagaggaattgtgatggttaattttatgtgtcaacttaactaggctaagagatgccctgatagctggtaaaacattatttctgggggcatctctgaaggtacttctgaaagagattaacatttgaattagtggactgagtaaagaatatggccctcctcaatgtgagtgggcctcatctaatctactgagggcctaaacaaaacaaaaagatggaagaaggaggaattcatactctctccttgagctgggctgtctgtcttctcctgcctttggacattagcaatcctggttcctgcacttttggactcagaccaggacttacacctttggcttccctggttctcaggcctttaggcttgtactggaaatataccactggctttcctggacttccagctgacagatggtaaatcatgggatgtctcattctccataatcatgtgagccaatccctcatggtaaacctctttataggccgggcatggtggctcacacctgtaatcccagcactttgagaggccgaagcgggcagattgcctgaggtcaggagtttgagacgagcctggccaacgtggtgaaaccctgtctctactaaaaattcaaaaattagcctggcatggtggcgggagcctgtaatcccagctactagggaggctgaggtgggagaatcgcttgaacccgggaggcagaggttgcagtgagccgagatcaagccactgcactccagcctgggagacagagcaagactctgtctcaaaaaaaatacataaataaaacaagataaatcttttatacacacacacacacaattggctttgtttctctgaagaaccctgactaacacagtgtctgtctctgcagtgtggcgagaacagacttagtttgaaaaacaaacaaaagaatagggaaggaacttaatcggcaaacagtaaccatagcactgttctagatcctttacaaagattaggttatttaatcatcatcacaatcatttgcagtagataccattgctattatcatattataggagaaaaaactagggcacagaaaggttaaataacttgccccaggtcacacagtttgtaaacagcagagctgggattagaacccaggtaatctagctccagaatttgtacttgcaaccaggatgctatgctgagaaacagaggctgttttcaatatccctgatttgcaattgctaataggcttgaactccacattcagtgctctttcccttacatggcactgcctctcatataactgtatgctcactgaagatccactatagaaagttacatctggaagaacctaaaaatcctcaaggcttcgctcagaccagagatcagtgcttctccaaaggagtgtttgatgttcctgtgaagtttcacaggagacttgcttctgaggtccgtggcattgatcttattcacagccttgttctcatttatcatgattctttaatcaatagatacttcagcaactggaactttgggctcatattcatggagatgacatttggctgaggccagtctcctttcagacgaccaatacaactcccctaccagggagcagatccaagattcctgcagtttctgaggcatgagcctttttctccacagaaggtgaggccaatggttcaaagttgtcacttggctttcgtataataaatgtctgtcttgggagattaacggacttcatttccttttccttcattttatgtggcctacttggcttgcaggtaattttaacagcaagaaaaggagatggaaacaccttgttgaaagcaatacagtgctctgtcggttctctgtaagatattttccagaggctttctccccctccacttccccttccgtgagcaggactataaaaggcagagagtgccttctgtcagaatctgcagcctggaagataattctctggggagacacaccaactaaccagttcagagcactttcctacccctgaagctttagaatatatttcacagccttctctgaattctcatatctaaatacatgcaggtaataaaactactataaaacaacaatgacatagttaaacaaaaatgcctgatggttttattctttttttatccttcatctctgggaaggagaaacatcgtataggcactttaatgagaaagccccaccttgaaagtagatgaggcaacgtttcctgaagcttacatcttggtcccacctttcagaacaaatgattttaattcacaatgtcttcatcactaaggtcatctttgtaagatccctctgacaagaagcaagtctgcaacatgaaaaataactcctgtgtcatggtttttcccagcctaaaagaaattcacacatgattagaaattattctttgtggtaaatggcaggaaaaatacctggaaaggtggaaatgatcacaaataaaacagctgaaagaagatggttaattgctgattaaattttgacattagctctatagataaatagccccatcaagtgctttttaggaagtgtcagtactggcttctttatggtatttaatcagagaaataaaagatggaagaaaatccatttttattaagtttctacagagctgagggcacaatgctaagtgctttccttcatgctaccttatttaagccgcagaatgcacctgtgagagtggtattaccattaacgtcaacagatgaggaaaccaaggctcagagaggtaagtggtttgccaaaggtcacgtgactaggaagtggcagagctggggttcaaatatcatgttgctttacttttttctgaggcaactatagagaaacaccatagcaaatacaactaataattttgacctacaagaaatctggggtttcccagagtctgatatccttcagcacatactgtctctccatctaacactctcatttaatgagcaggaaaacccttcctagggccccctgtactttgactcagtgactattctttgtaggtatcctttgagttttagctatttggttagtttcatgattcattcttctggtattttccagaggccacagaatagttgaccacctccattactcaggaatattttggtttcaactgaaagtaaccaaattcattctagcctaagcattcccccgcaaaaaaaaaaaaaaaaaattccaaaaagtgttttaaagtaatattttaaaataaaaagtccaaggaaagtttgaaaattcaagccccgggaagggcaagaatcctcaaaaacaataggaaccaggaattcaaataccatcagctagctcacccataagcatatgcacatttcacttgtaaattctgtgtgtgtgtttatgtgtgtgtgtgcatgcaaacacacatgcactaaaaccttacaaggtgtagctacaggcctgattcttttgaggttaagttcaaaactcttacagaagggagtacatccagctttgggatagtgcctacactactgaaccaaacaatagtggccaaagggcaaggtcagaacatggccacatcaaagataatcatgtaaaaggagagaggcttaggaaaaagtcatgatacaggcaatcctattgaagcctgtttatcagtttatagatgagctacccttaaaagtgcccaccctagtccaattagttacagttgagaatagtcatgttgtactaaacacatcccactaagggctaccccttgagctggggctgagcatgggacaggcactctactacacatattcaaaacctattcagaatctgggagccactgaagcacttagatatagcactcaaccccctgacagccacaagtaagggctaagacccagaaaagctgtgtgatacaaaagtgatagtacactcttcaccttgagcctcttttttcaagcaacgttactcaggccctggccagctgacagttctgccacaaccaactcaaggatcactaaggaaatactctcacagaaagaatttgccacaaaaagactattatgagccctactcatcagtcatttaatttccattcatttttcatatccacagagatcatctcttgcccacttaaatttggcctccatttcttctcccatcacgaacaggagtggaattggtatctatgtttgttttacctgcggtgaagctcagagatcaacttagcgctcattaacatctcatctcagtttcctagaggaattttctgttccatctctcattatcagagactgtaaaccagtggcccattggtgactctggtctgcagacctgcactgaaagacacacacagtatttttaaaaatatgaattacctgccaacatttagaatttaggaaatttacacaaatgttaagtttccagcttctcatgaaaacatgaatgaaatggccccacttgacctccctccacacaggagttcctcctggaaacaatcagctagagctcagtatggttactcacttccttggggcatgtgctcttcgcatcaccctctgttgtattaaatccacttccctcagtacccttacttgctacctgcctggcccctgtaggtgtttgagtttgaaagccctgccttcaatgatttttgaattccaatattggtaacaaggctggtgtatctttccatctcaaatcattctttttggaacgattacttatactttataaaatattatttttaaaaatagatcaatacagaacttttaatggctttataataccttcaggataaagttcaaacccttagcaaaacattccagaaaaccttcataatctaactctaaactgtgtttacaaaccacagcccataataccccatcatgtgtgctctgcaacagccacattctgatgatttcagccactcttcatttcttaggcccaccattgtgatttcctgtctctgtcacaactcattctccctctgcctagaatactctttgcctggttgcctggccagctaacttttaataccattgtatagcccagacgcaataccatctcctctccatcgcccttcaaatcatgtgcctgtccacggtcacccgctaacccatacagtgccttagtgagaatttttaaaatacatcccttccttcagacatgttcctttatctgccagaaaactgccctaatgtagatattttgggtacctacactgtgggtggtttctacttaaatttgtcacctttgcacagtgcatgatctgcatggctgtacatagccatcctgctcttgtcaggggcaatttagcaactcttctgtgttcctacagtaatgttccacacttctggcatagaatgaaaaacatcatagtataatgaatttcccatgtctgtcatccctacagacatgcatgccatgagttcctagggggcaggaaccacattctgatgatttcagttttctcaggacacatggagggcagtccataatgggcattgaatcagtttgtcaactattgaattgcatacacccagcagctggatagactgaatggaaagcagcaagatcagtgtgtccaaagacataactagaaaggagtggagggtacagttcacaaaggggcccagagacccccttagaagcaactagctttgaattgtggggaaaaaaattagagatctataatcctattaaaagaaaaaccaagaagactgaactaaaatgtgttgtgttattccattctcaaaatggatttttctttatatttttctaactcctaacacaataaaatagcttcattctgacagtcatcttacttaaatggaaacatgatttaacaaaatgatactttatgagctgtaaaccaagcaaatatttgacataaaatggaagagagagacagaaaggagaagaagggtaggagtggcaaaagaaaaagaaagaagcctgcttctaggcgtgcacacgggcctgttttacagtcatcacacctccaggtagggctcctggctggtccaagggataagtgaggagaaagaggtcaagcaggtttaaagcaaaacacaggataagccacagaggtcagtgctatcaaggtagtaatctttgctcaacaaagacaacagcaggaccagggagacctccgtgagcagagactactgctgaccacagagaacttgagatggtggggcctttctctctcagcagcccaagtatgtgggctggacttagagggatctaggccaatccaggtagtatcttgtccctcaaatatcaggaattatcccaaatcagcctcatctgaagccagggccgcatcttccagcttgactggactcacagggtcttgctgggtctagctctagagtaacaatccaggctaaaacttgctctttgaagagcttcccttcctcctgtgctgaaactgaggctcaatctacttatgctgcagcctgtggtctaccgttatttctctttcccctttgcccatgcctaattggtaaaggagtcaggagttgttttccttcactactgtggcaagtacctttaaacttcctctcatctgtctttggctgaaagagcagtctactaccttcttgtggactggagagaccatgatgatatggttaggctttgtgtccccacccaaatctcattttgaattgtaacccttcccccacaatcccaataatccccacgtgtcaagggagagaccaggtggaggtaattaaatcatggggtcagttaccctcatgctgttctggtgatagagagtgagttctcatgagagtcgatggttttataaggggctcttccccccacctttgctctgcacttctccttgctgccactatgtgaagaaggatgtgtttgcttccccttctgccatgattgtaagtttccttaggcctccccagccatgcagtactgtgagtcaattaaatctctttcctttatgaatcacccagtctcagacagttctttatggcagcgtgagaacagactaatacacatgggttccttagagcagggtctattcctaaaaatcaaccttcctttaagaacaggaccaatctcctgctccaccccagtccatttttctttctttctatttttttttttttttttagatggagtctcgctctgttgccaaggctgaagtgcagtggcacgatcttggctcactgcaacctccacgtcccgggttcaagcgattctcctgcctcagcctcctgagtagctgggattacaggcaagtgccaacatgctccactaattttttttttttttttgtatttttagtagagatgggatttcaccatgttggccaagctggtctccaactcctgacctcaagtgattcacccacctcagcctcccaaagtgctgggattacaggcatgagccactgcgtccagccagacagatattattattactcccatttcgatttcacaggtgtggtctagagtagtttgttaacatactcaaagttacatcattaaataagttgtggatccagaatttgaaaccaagactaagcaaaaactgaagatcaattgtagtccctgtgggatctacttaaaatgcagatgctgattcaatgggtctgaggtgggccaaagatttggatttctgaaaagctctcaggagatgctgattctgcaatcctcagaccacagtcaaggctctggagttttctgtatcccagaggaaaaacacaataattatagttctactgtcttagaatcataaagacttttagcctatagatcttctgtgatccaccagtcagtgatgtcatgtatcaaaagctatgatgggcaagaaatgggcatgattcccccaactttcctaggaaataacacagagaagaagctaacaggaaaggaaccacctccaacaccgcccccccacccccaatttatggccattcaatgtttctttcatctccctcaagcaaatctcttacctctgctctaagtcacagtgaaaccaggactaagaatgaagttctaagtaatcctctctttgagctgcaaagcaagcacttggatagcttactcctttcactcacagctgcttagatggccgcagagtacacaccagaggaatgttaggctctatatcgtaaagagctcggaccgacacaaaattccactgagacaaatcatcttgctagcaagacccatttatacaagtctggaaatcagtgaataaccagacaattgctataaatgtgcctttcttgaatgcggtcttagaaaatgtcagatgaacaaagtaagtactttcacggtagcagaaggtcaggtgaatgttcagcttcacaagagtattcaccatgaccttcaatgttttcttagctagtttacgtacaggtgagccccaaatccttctttaaaaagtatgtctcttaacttctagaggtcacacttccaaactggaagttaacaatagagcccagtcatctttttgtgggtctttttctttagaaaacataaaataacctttcaaatgtttcagagacatatggacaatgaaacactcccatttcttacccagccattatgcaaggagcaaaccatagataaaggcacttcaatgtgaaatctcaataaacccattgctgccagcagaggcaagtatgcaagggtttcagcagactttgataattaagggtattttatttcctctaaacaatgtttttgtaatatctctaaaggaaggattctacaacttgcctgaatcttccaacgagtctctgagttgacaactaataattaacaaacaacgaatagtgtcttgctgtccatcacagtgactggtactgtcatctctgagaagaggaagatgtgctaatgtggcatgcttcataatacccaacttttagctcagcacctgatgtgctgggcagtccattctcaggaaaatttggcaagtgggggttggagggacaagtgacaattctctggagccattccagagaagccacttgccaagagaacagaaattcatggcccagaagctcctttaattcagttatttcatcatctttctttgcagtgctactctcactaacttggatcaattctactcatacttactgagcacctgcatgtgcaaagccaggagaactctggagactaacaggccaagtgcttcaagggatcttggctgctgagctgggctgtgatcagtggacacagaaaactagtcctgttaagtgtcactaagctgtatggccctagtcctggcaggatcattttctattctcccctcttaagacattacccacctcatttcaagatctatgagctcacatatacatacacatgtgggcagacctattgcagtctttccaggtaactaatatccagagttatctacctacctggcatggaacctggctttttttaggatgagaggagagggagctggggaaatttgctcaagtcacttaggggaatctgtccaaccatgggtataacacaatcatggataacagcagagttaagacacaaatgactgctatctgggggccaggagccttgggttctagcctcaccctgctatggattgtgtgaccttgagaaagcccctcctgtcttcgaggaagctgaagtgcctatctgctaagagaggtaattagactggatgatgtatgctcttcgctgcattcctaaccctcagctcagtacctgaaaatgtttattgcctgaatgatctgccacatgctcttccattgctgacatgccagaacactgtggaatcatcccccctggtactctgaatctgccttcacagctaggctatctaatgacagaatctgcacttgaatggggatttaaaaaaataataaagtgacaatcatctgagtttctcttttactttctaaatcattcctcagctcacagttgcttcctcccatcacccaggagacagaagctcacaccaatcatgctcccttcactggtggtacgtgccactgtacacagaaattggtaaggtctgtgaacataaggaaagcattagagacaaaaccctgagtcccataatccccagctcagacaacacagcgcatagccttgctgccaattcgtacaaggaaagaagggagcagacagaagaatattaacactgtcaatctgaatatgagggtttaaaattagtaaagggaaaaatatgtcattcatgattcaggcggcattgcctattgctttgcacattcaattcaaccaacaaaccacttggaattcttcatatccaaaatgtctactgacaaaaatcagtgctaagatcaagcttcagtgaaccaaaaagctcacagagaaaatagggaggagaggctgaaaggagaaattgaaatcacagattaaattggtgatttctgtaattctgtttactgattaccagataattctggatgtattggaaagtggccaaaaacaaaaggaagaaaagaaaaaagaaccatggcaaaatatgccaaggagaacaccaagcaggcagattttgtgacattaaaaattcttgaggctgctgtcacctctgttctgaaaatatagctggaggctgggatatagcagcaagagagaaatccatcacttacatgacagccaccaccccatgccttagtcttgttgggagtggaaatggaacacctgagggagtccagtgagcaagaccagggcaggcaggctagtcatcactctgggggctatggggaggggaaggagaagggagagaggggagcaagttctggcacttcactgggatgaaaggataagagtgaaaagagcatgcacttgaaacctatccactcactctcctcaatactcagaatgtggcagggtgccagggaagaaaccacaacactgaccatgagcaatggagccccaaaggctataggagctccctgaccacgtccccacgccccaaaacacacacatacacattttttacattaggtgcagcacaaatatttggaacagaatcaagtttgtgaagctcagtcctacctctaccatgtgttctttcttgagcaaataccagctcctccctaaattcagtgtccttaattaggggctacagcagctgatctcataggaccatctggatctgtcatgacaaggctaaaacaagctcgggggcatgggaacacaagaagagccccctaatccttgcctgggccaggtgaaattgaggataagtacaccaagcagagggtccagcaagtatcagcagggttgtcctgcaattgcagtgggcatgacagaagtttctagtagtcctggccttagagatacttgattagccctgaacaaagtgcgcattacccaagtgaccaaaggcattcttgcctcaatcatgacagtaatatcctagctgatgcaggctcactctgtcattccacagacagcctgtcagcatctcataattaggaaaaaatctgtttctcccatcatcaagaagcttagtttttcagatagctgccacaagggagacagtatttcaaacaaaaaggttttaaatatcaaaatccagacactccagcaagtcacatctcaacatcatggccttagataacccaatattcttaaacttcccctctttgtgctcaagacaagaaattgcccttctttttccaagatcagaaccattcaaacttttgaagtaacacatgtcaatctggctagaaagaacattttgcatttagcaagaaatccaacataaaaggcaaatatctaatcaaagtgaatgtcactgaaatcatgaccagctacacacctgttcctataggatatgcagcaaatggatacaagactcctgtgcacagaagtgattacttcctcctgcaaggacttgaaggcaaacaactaaagtgcttcatttatttcctttccttgtccatgcttactatacacaaatgaggcttctggctcactagtcaaagggaaataaaatggaggccacttggttagcaaagatgaatggggtttccattggtgttcccatgtttaataacaagtccattggcagtgcttctactctaagagtaacaaatgctcattatgaaaaatttggaaaatctagagtattgtacaaaaagagaaataagttctatcccaaaatgactaatgtaaacattgatacggttctgctatggtctgaatattcatgttccccaattattatgttgaagcttaatccccaatgcaatggtattaggggatggggtcatttgtcaggtgattgggtcaagagggtggggtcctcataaacggaattactgtccttatgaaaaaggccccagggagtttgtctcttccacagtgtgaggacacagcaagaaggcatcgtctatgagaaagtgggacctcaccagacatggaaactactggtgtcttgatcttggactccacagcctcccaaactgtgagaaatacatttctgttgttaagttgctcagtgtatagtattttgttatagcagcccaagctgactaagagtaacaaatgctctgtctttttggttataaataagtcctgtttgttttataatgttgtaattgaaccgtgtccacaattgtatttaaaaaatacatacaacttaagtatctttacatgttacagccatcattttgagagccacacgaaatggatgtgatagagacaaaaaagtgcaccataggtggttaagagcatgtgttctgggattagatgcagctggagtcaaattgcaactctactatttactggttctgtggtcttacatgagtgactcaacctctgagcttcagcttccttctctataaactagggatgacaatagcagagtacccattatcaggttgttttgaggcttaatgagataatgccataaaatacttaacacggtgctgggagtaactccttagtacatgtagctgatattactactcttaccatttttaacttatccattctcttactgtttaccattggattgcttccaaattttccatttggataaatttgcaatgtgtacgtacacagtttgaatttttttccttggcatatattttccaaaagtgaaactcctggacattctatggtcattaatatgtattttcaaatttgttggttaatgattttgtcctactgggaatcagtgtgaagatactgtcaaggactggagaacagagtgagactaagggacccttgaagtccttaaatatcttaagattatgaaggcccttgaggaccaccaagtgcaatcctgcttagactactaatgggagacagctgcctgtatcaatgactttggcctcatttaagataggcataaaccatcagagcaatgtgcatatgaagcagcatgcggtcaggcactgctgagagtttgtatcatccatgcacacaggcaactgagcatttaacattgaatcctgttccatgggttctagccctatcctgaaagtcaggagcatcttctcacatcatcatcatctcacctgtcatcatcaggaaaatttataagcatggtagtggggtaacctgcctgaagtgcttttctccaacttcttgaatagccacctccttctcatcctttatgcctcaacttccatgccatctcctccaagagttgagaacaccaagttttgagtagctatctcacacacaattctgtgtaaattaatttccttccaagcattcatcatgccttgtaatcatttacttgtttgttcacttattcgcagtgcatctccctaatttgactatctccttcaggagggttgggacaatattcagtcttgctactgttgtacccttattccccggctagcaaagggcctggcacaaagtaggtactcctgctcccattacctgtttgtctgatgcccaggggcctcttggcaacataagcagcttgaccttgagctggaaagagggaatacagaaatgaggtacatataatccctgcctttaaggagtgcctatggcaggtttcttttcacagtcatcttagaaagaaccaagaagcccttttacaagagctacattctataatgctgaggaggcagctcgaagctggcactcaacaatcgatacccaaacataggaattgttattctaccaccccaacatgcgcacttggactttgcacctgtgtagatcttttctgctttagatagctctcaaaaacatattcctcaggaagccctcacaacatcccataagccatgagctgaaagggctggtgaagcagagcaaaaataaagaaaaaaatggggcaagagacacagggccagagcctcaaaactgggctctaatcccagttgtgccccttaggatgaaggatgggtcatatcaaccctgagcttcagttacctcctgaatagtagtagatagtacactctgccctgccttgtggaaagcctcaatgaccatgtgtatgaaaaacaatagtgcaacagggaggttaagagttagtatagaaagctggaaagataaagaatatgccagcctggtgaccctctgggccccctctggcacatatcaatggtgaaagcagagaaagaaccacatcttctgtgcctagacctgaacttccctggcagaggaatttttaggcctctttaaatagcccacctgactttcatttttggttgtacctcctcctgaatgaacacccaacagctactttgttcttcaaggcaagttttctaaccaactaggcagtatctccatagcagccaaaagagatctttaactgttaaatacaaaagctcagacaaaccacaaatgccctattcaccttgtcagtcctacaaaaagaagttggggttctgtcaatttctcctgccacatacagctgcaacactggcttatattattagttacatgcagtatgtgtgtctctggttataacagatggtgtttgcactgcacgcgaaagctccagatagtcaaatagtacagctatggagattttccaaagagaagacaaaacaacaacagaaaatactcccaccagtgaaaatctgaaaagtgtttgtcttgctttctactttggcaaaatagagaacatccgatttctgcaatagctttactgactgagaaaaaccagcctagcacagagagagtgatgccaatagaagactacctaagcagcatgctgtcacccttctagaagggctattagttaaaagaggtgaaagtacacagtctaggcctccttgccctgccaatagatctgcaagctgccaagattgccagctccgtgaatggacttttctagatgggagaaaactctgttttagtagaattcccagggtttctttcctgttaacttttaaactagagcttaagggatgctggaaactcattttcttcaacctccttaattcccatttgaggcaactgaggcttaattatgagaggatatttagccaagtttatggctgaaaaatgacttagctctctaagctggtgcacctcaccaggctccttacacacttggaaaaaaacaaaaagagcctattcatgttttaccaatttctcaagacccatctgctcccactttttcctgacctgctcttgttccaatacccttgtgactcttgccttccttgtgactataaccttgggcctgtctctggaccttcgactggggtctggattttgcctcaagctttctgtaaaacactaagacttgcctccccatcatgacccaccactttggctccactgactccaccccacaatcccagcaatctcatctgaaccatggcccagccagttcaagccatggctgaacaaactccaacaaggaggagattcagatagaggcaaaaccaagtcaaagcccaggtcttctgaccctgaaaccaatgaactttctactactttctactgcctactccttgcctctgctttactgttagttttacattctgtattagccagtaaatctagcccctctccattatatgaagacagttttcacgtccctgtaccaccccaaccaattttcctgagccttctctcctctacatgaatcatccacagcttcttaaaactgacctcataattcatggtttccagaccttcagagggctcataaactcaatcatcatcctctttgaaagaaaaagtgataatactttggatcaccacatcctttgctttagacaatctgctcatatcaatgcagctctgatcatggtcacatttgcatcagctgcaagtcatattataccaagttgtggccaattaataccccatgtttacattcaaagtcagaattctccttggatattgttcaaatcacaataagagaacaaaggtgcattctcttttctctggggcctctatgctgggattttgtaaatccaaggatgccagaatctatgttttccaccaagtgaaaaaagctcaactgcagtagaagagtttgaagccaggaataaatgagcagagctctctctctctctctctctctctctctctgtgtgtgtgtgtgtgtgtgtgtgtgtgtgtgtgcatgtgcgtgtgtgtgtgtgtgtttgaaagagagagagagagaactagtccatactagcatataagcacacagtcactggtgttatcaagtctccaattccccaaatcactgaggtctcctgagctgctttagttcctgaagctcttccacttgttctgggagctacaccagtattctgccaatacattttcttgcatgcttaaacaagaaaggaaggtttctgtcacttacaaccaaaagaaatttgatcctgaatttcctaaaatcttcacattacaggcttcttcttgtccattattcattgttttatggccccagtgtgaagcagttccctgttgaatgaaacttgagatcaggaatctggacagccagaggggtcgagagaagagggggtacagtaatgctacagaccaagtattctgcttaccactttgctgagcaccagcccaagccttctctaggatgctccagtgatccctcccatcccataaagctcagatgagaatgcgcaggagtctataatcttgctgtttcctgaaatcttttctccagaaggtaggctttgcggaagatgggttcctgggatagacaagaagttattgggaaaattataagtctgtgacacagtgtgaatctgttttgttcctgggccctttatgatgccattctacccatttgtattctgccatggagaatctaagaaatcttgagctgaaggtagcaaaaatcatcataatcaagttgaatctcaaaactgccttggactcctccttttagaaagtgttctgcgcacacataagaaagggatttagcttaaggcccagcagctaaaaagtaaaacaaacaaacaagaaatccacaaaacttccaagccagctatttgcttatatgggcaatattgtacaggaagatcattaatatgatgttggttagagagcaacgttcctggcattactctcctcagtgtggctaagaggctctccagcatgtactattagtatctggaggaaccatggccagttaatagccttgcagatgtaaactcactcagaaggaattatgtgcttctactaacacagtactgttggagcgagctttgcttggttacgtacttggccacaagccttcaattcaaggcattacaacagcacctcacaaattcacctaccagtaaatctgtgtattctcttataataatagtaaaaaactactaaagaaagattttattggcttactggtttccactctcctgctttattttaggaaataatgatgtttctggaaccacaaaagtatgaaagcatgggaacaaaatgtcacctgtttaactatgaaaaacatagttcatatatttaatatatatataaaataatatatatgtattttataaatgtaatagtgtacatttatgtaatatgtatgcgtacatatatgtgtatatacacatatatgtacacatttagcacagtaattgattactaatcttttggaggaaatgcaaactgtccagatggcaataaactgaaggagtgagagctactaaatggctttcgattaagctgctaagtaagaatgaagagggacttacaaacacatttgggtatacacctagagtgaaagaaagaatttctcagtagatttttggccactaccttccccctaaataacctttgatgaagcagcctgctcacctagttacagatcatcttagagcccattcttagccccttgaagctattttaaaaagcacagaaaataaatgggtagtgcttattaaattagcattgattttggaatgaggcattttataactccttcaaaaatggtgtcccaagaaaagtgtgagacagtcacagatagggactgggactttgacaagtgttctaagcattgtccttcatatcattggtgctgtacaaccaaagccacttaaaaaatggatttgaaactgcttgagcaaataagttgcaggaatagattaacactgaggtcttctgatgctagattgtgtagtttgcttcacatccaaaagacaaattgtagatctctgctttcaaggcagataacaactacccttaataaatgtgcagtcatcctagaaacagaatgcagccaagtaagtgagaaagtgcgttggaagaatgtgagcccttgctaaataagcagtacagacacagcaaatgtctgtctccctctttccggaactgtcctggccttaaataccctagtagatggtatccacataaacccctgaagtgtcctagaaataccaacatttcagcaaatagtgacaaaattaagtcagtaattgtagcaacaccaacttcaacaggttacagagatcacatcacagatcacgtgtccctggtcctctattgatattgataacacagtactacgaatttaagaggcatttctatagtttgttgttttaggtggaggtctttgattataaaccaccacaaggaattcttggtaacttaagcaaaaatgagaaagtattagatggccatggggaatttttatcagatcatagaaaactgaagaactagacttgaaacagacaggaaccaggagctccagagggtttgggaacacccagcagcttcaatcaagtatatgccaccactggaattcattcactcatccaacacatatttgcaagtacttatcatgtgccaggcacatgataacagatagaggatgctgttatatcctctacatggtgaggatatagcattaaacaaaacagacaacattcctcattctcaaggaacattccttctggtagtgggagatataaaatagcaaaaactgataacagtagtaatatctccaacttttaagcatctactgtgtgactggcactgtgctaagtgttttacatattcatacatttattcaaaaaatatttactgagtcctagtatgcaagagaacctatcctaagtaagggaaatacaaccatgaacaaaactgataagaatccttgcctttgtgaagctgatattgtggtgaaacaaataaattcaaaaccctcaaagattaaaatcttaggaaacagcacacaattggccatgctgaggttatgtatctgcccccagcttcataagggcagtgagggggatgatctgatagaaggaatctccatacaccctgtccagccttgaaagtgggagaactgtcccatatctactgcccaaccaaggctgaacacggtgagagaagagtcctcaaaaagaaatcaaggatcctgagcaaaggaaatggaatgcaaggcagaaaaaacaaacccattcctttgcataaggcatgggacaatgaagactacttcatctgggccttattaatgtgtcttggtgaaaaaaaaaaacagaaactagattatatctagaacacaaagtgaaactatgttttagaccacttgagcttaatttcagctccattatttacaaggctatttctaggaccatgggcaattacttaactactctgtatctcagtgtcctcttccgtgcaaagggggatgttattagtatttacctaatagtgatgtcatgaggaataaataagttaatatttgtaaaatgcttagaacaatgccagaaatacagtaagcattatatacatgactgttaagcaaataaagtagaatgcttaattgatagaaagacattcatggtatattatgtgaaaaagcaggttgctcaataagtacacagcataatcccaattcttatattaaaaattaacagttattagaaataccatttgacccagccatcccattactgggtatatacccaaaggactatacatcatgctgctataaagacacatgcacacgtatgtttattgtggcattattcacaatagcaaagacttggaaccaacccaaatgtccaacaatgatagagtggattaagaaaatgtggcacatatacaccctggaatactatgcagccataaaaaatgatgagttcatgtcctttgtagggacatggatgaaattggaaatcatcattctcagtaaactatcacaagaacaaaaaaccaaacgccgcatattctcactcataggtgggaattgaacaatgagaacacatggacacgggaaggggaacatcacactctggggactgttgtggggtggggggaagggagagggatagcattaggagatatacctaatgctagatgatgagttaatgggtgcagcacagcagcatggcacatgtatacatatgtaactaacctgcacattgtgcacttgtaccctaaaccttaaagtataataataatgaatttaaaaaaaaacacaataagaaatgaaactttcattttagctaatcctgtaatacctgctacagtaaaatgctctttgcagttttgtatgcatgtgtttccatttattgaaattactttatatataagcatatatgtaaatgtttacacttattttattaaaatcaaatctatcaggctggaaaaaaataaaaataaaaaaataaaaattaacagttattatagaaggttatatatataagaaatatgtgtatcaaatagttcaaagtatttatctctgactggggttgggtgatatgaataatttgtattttctcattttttcttgtctgcttttttcaaattattaactgaatatgtatcactattgtaatttttaaattattaaaatatcatattcaaacatgtataaacacctaaatatcactaaaaggggatgtgttggcagaaggggaagtgaccaattacaagcatgtcttaaactgttaaaaaattaatgttacgtagtaagtcacactgaaataatataaaagtcaggaaaattccttctcaaaaataattataatgaagacactgtagttattacttggaggcgaatattacattggaagaaaagcaatcactaagaagaaccacacctgagtactgggctcaattattccttgacaaaaggctactgaagactctcctgcttaagtggaaaaagcctaacactctttaaagaaacacagagttcctggtaacctgagagagaatatcaaatgattcaacatatatgtaattgggatcacagaaatagaagggaagaaataattagacaaatagatagatctataaaagaaataatgtctgaaaattttccaaatttgatgaaaacaataaacaagaatctaaaatctcaaacaaaataaacacacaaaaatttacactaatacataccataatcaaattttaaaatttaatgatgaaaaaaatcttagcagccagagaagcagacatacagttattacatacaaaagaacaaacataagaatgacaataacttctcatcagaagctatgcaagccagaaggcaatggaacaaaatctttaaagcactgaagaaattgtttacttagaatttcaatcttgagaaaatatctttcagaaataaaggcaaaataaagaattctccagtcaagcaatatctaatataattaattatcatcagacctgtgctacaagaaatattaaaggaatttcaccaagcaggaggaaaataataccagatgggaaaatatggatttatacacagaaataaagagaattggaaagtttaaatatatgggtaaatattttttaaatgtcttcacactttattgttaatttacttaaaagctaagtgactgtttaaagcaacaataataactatggattgtgtggttaataacatatgtagagggaaatctatgaaaataatagtgtaaaatagaagagaaaatggaaaagtattgttgtaaggtttttacagtttacatgaagggatataatatcttttgaggaaagaccatgataagataaagatgcatattggaaatattagggcaacttgtgataagataaaacaaagaggtagagctaataagtcaagaaaagagattaaatggaatgttaatgaaatacctaaataatgccaagaaaggcagtaaagaaaaagctgcacaaagaacacatggggaaaacagaaaacaaacaacaatgtatttaattccaaacaaattgaaaatacattaaatgaaaatgatgtattataagatgctatcacactgcaaaaataattaaatgctccatataaaatatacaatttaaatatgaagacagagatagaagaatggaaaaagatgtagcattcaagcactgatcataagaaagctggatttttatattaacatcagataaacaagacttcagaacaaagaatattgctcaggctagtgaggaacatttacattttataattataaaagagccaattgatcaaaaatataattctaaacatataaatgtgtataacagatcttcaaaatgcatgaagcactgacacaaagaaaatgaaaaataggcaatttcacaattacatttacagattttgatattctatcttctgtaattgatacaagtataccctaaacattagtaaatatatagaagaatggaacaatgctgtcaaccaattttacctaaatggcatttataaagcattccatccattccctaacagcacaaagcacattattttaaaagtcatattggacatttcaccaagatagaccacatatttgggccataaatcatatctgcatatatttaaaagaattgaaaccatacagagaaggttctgtgatgcttaatattaggtgtcaacttaactggatcaagggatttcaagatggctgctgaagcattgtttctgggtgtgtttgtgagggtgtttccagaggagactgacatgtgagttactggactgaaagaagaagacctgacctccatatgggcaggtaccatctaactaccgctggtgcagctacaaaaaagcacatagaagaaggggggacattcggtttgcttgctcttttttctttgttcactttctctctttctctatcttccagagcaatatgcccttttcaaccttccacctttggatatcagactccaggttctttggcttttggtctctgggactggcaccagtggctctcaggcctttggcttcagactggaggctgcactttcggcttctctggttttgaggctttaggacttggattgatccatactaataccttccctgggagtcatgctactggcttctctaggagccatgctaccagcttctatatttctctagtttgcagacagcctattgagggacttagtctctatgatcctgtgagccaattcttcctagtgaattcccatacacacacacacacgtgtgtgtgtgtaaatatatatatataatatacataaaatgtttacacacacatgtatttatcccctattagctctgtccttatggagaatcctaactaaaacagatttcatggccacagtggagttgaattagaaataaataacaaaaatacaaaaatatctggaaatgtctcaaatatttgaaaaattttaaaacctactaaatgttacttttacttcaaatcaagacaaagtatcatggagaggagttatcctcctttctaaaacaactaaaaggctagactgaacatgcaaataatggcactcaagacattggacatcaggcaatgaaaaataattatccttgaaaaaaatgaaaaacaaatgaagtgaaccctaatattggcccagactactatttggagaaagtttcagagtgcaacacagaaaggggtaacttaggaagcctcctttaattaagtagacacaggtgggaatctgagaaaattaaggtggttagagttcatatgagagggtaccaaagaggagagagatgcacagagaaaaatttcagagatctgcagtggtctccctcaagtaatcaagagagtgctaatctgtgtatgcaaggctagggaaataaccacccacaaggattgtaaagaacagtgctcagagatcatacatattcagaaaaattatctactgtcaatagtcaatgtgtaacatcttacaattcaggcagcattggttagaacagtagttcccaaaggaaggcaattttggccccaaggggacatttggcaatgactggagaaatttttggttgtcacaactgggagcatgctactgatatctagtctgaaagttaaacaatgcacaggaaatctcccaccactaaaagttatctgtaccaaaatgtcagtagtgatgcaattgagaagtcctaggttaaagtactaaaaaggtcttgcctcagtaatagtcaaaaattaaccctaatccaggcatggtggctcaggcctgtaatttcagcactttgggaggctgaggcaagaggatcacttgaggccagaagttcaaaatcagcctggtcaacataatgagaccctatttctacaaaagaaaagttaaaaaaaatagacagtcctggtggtgcatgtctgttgcctcacctactggggaggctgaggcaggacgatcccttgagtccaggaatttgaggctgccatgagccatgatctcaccactgcattccagcccggatgacagagtgacaccctgcctcaaaaaaaaaaaaaaaaaaaaaaaaaaaaaaaaaaattaaccctaaactaaactctgttcttgttcttgtcccaactaagaaaacttttgcttctgtaagacctgaaaacaaacaaacaagcaaaccaacaatttccacagaactgaatcccagagcaaagatcaaaaacaagctcaatttgtagaaatgtaaacatattagtaactagtaaggcaaaatatgcaatgcctggtagccaataaaaatttaccagacaggcaaagaagcagaaagcacaacctacaaaacctatttttcttttcatcaaaagaaaaatcaatcaaaattgacagaaaaattaaaaatatgatagattgatagaaaaagatattaaactattattataactatattctatatgttcaagaagctggaggaaagattaaacatgttaagtagcaaaatggaacatatgaaaagatccaaaccaacttctagacatgaacactaaaatgtctgagattttttaaaaagttagtggacgtggttaatgacagatgactcattggagatgaaaagattatgaagacataccaatacacacaaatacacacagagtaaaaaacactctaaaataaaccatggagtgaaaactaactaaaacataaataaataattaataaacgatggtgcaaactgccagcaacaaaatatacattcaattgatgtctacgaaagacagaggagagaggggaagtccaaaaatatttgaagaaaaaattggcaaaatttttcaaaagttgatgtaaactgtaaacccacagatctatgcagctcaacaaactgcagcacaaggagcatgaagaaagctatactaagacataatcaaatggcttaaaaccaatgataaaaagaaaatcttagaagcagccagaaggggaaaatttgacatatagaggaacaaagacgaagataatagaaaatttcctaatagaaacagggaaactagaaaagagtaaagcgagatatttaaagtattgaaataaaaataattcaacctaaaattgtttatactatcttaaactatctttcagaaataaaggcaaaataaagctttctctgacagaaaagttgaacagcagatgtgtactacaaggaagaaaaacaaaaccagacagaaacttagaatctaaataaatgaataaagagtcctggagctggtaactgcataagtaaatataagtaatttttctcattatttaaatctctttaaaagatcactggaatcatgagataccacttcgtgatcccccggatggctaccatcaaaaagtcagataccatcaagtgttggtgaggatatgaaaaaagtccaagcttcataaactgcaggtaagactgtaaagtggtgcagccatgttgaaaaacactcttgcacttcctcaaataattaaacgtggttaccacataatccagcaattccactacaaggtgtatacccaaaagaaatgaaaacacatgtccacctgtatataagtttatatacagattgttatagcagcattattcataatagtaaaaaaagctggaaacaacacaaatgtcagtcaatggatgaataaacaaaatgttgtagagctagacaatgggatattaattcattcttaataaaaagtgaagcactgatatgtgctacaatatggatgaaccttgaaaacatcatgccaagttaaataagtccatcacaaaagactacatactgtatgattccattcttatgaatgtccagaatagggatctaaagagacaaaaaatagaataattgttgcttagggctaggtatggggaatagggacggggacggggtatagaggggtgacagataaaggatacaggttttttccttgaagtgatgaaaacattttcaattgactgtggtaataagtatatatttctgaatatagcaaaaaacagaattttacactttaaatgagtggactgtgtagtatatcaaagacgtctcaataaagtaattagaaaaagagaattggctcttttaaagaaaaaataaaatgtatcgtaggatttataacatattgaaataaaatgagatcacaaaggccaaaaggggagaaatagaagtatactatgtatggttctcatatttcatgtgaaacagtataatgtcacttgaagacagattgtgataagttaaagatgcatattataaaacttacaggaaatactaagtaacaaaacacttgttataattaacaagcccacaaaggagataaaatagaatcataaaaaactcagttaatccaaaaatgacatgaaagaggaacaaagaacagatgggacaaatagaaaacaaatataaaaatggtagatttaacctcagccatatcaaaaattagatgaaatataaatgttctaaacaccacacaaaagggcagacaaatcagattaataaagcagcaaaacctaaatatatgctacttaaaagaaagccactttaaatatgaagacacaaataggttcaaaaatgaaagagtgaaaaatgatatttcatgctgacgtccagctgtccaaagaaagctggaacagctatattagtatcaggcaaagtggatttcagaggaaataatattgccagaagtaaaaaacgatcattttctgatgttaaaggtattgattaatcaatataatgtaacaatctaagaatttatgaacttaaaaacagagcttccaaatatatgaaacaaaaactaataaaaactaaaattaatgagaaaaatctgccattaaaataggagatttcaatattcctctactaataactaatagaaaatataaacagaaagtcagcaatgatatagaagacttgaacaacaaaattagtcaacttaatctaattgcattcatagaacactccaccccacaacattagaatacacatttttttttcaaatgcacatgacacgtttaccaaaataggccatattctgggttgtaaacaattcacattaaatttaaaaggattcaagttatacaaactatgttctctgacacctatagaattaaattagaaattaacaagaggtgtgtacttttagaagctagtaaataatacacccatgactagatatctctttcaaataaaaaaatcaagaagagaaaggtatctgaaaaaattccaaacatttgtaaactaataaaaaaaaattaaaaataagaaaattttaaaaaataaaaaaataaaataaataactcatggatcaaagaaaaaaaattaaaagggaaatgtaaaagtatgttaaactaaatgaaaagaaaacacaatataacaaaatttgtggaacacaaagtagaatttggaagaatatttatagcattatagacctctattagacaaaaagaaaagtctctaatcaatgatattagcctattccctaacaaactagaaaagaaagagaaaatgaaaaataagcagaaaaaactaacaaagaacagagcagaatcaatgaaatagaaaatagaaaaacaaaacaatagagaaaatcagtaaaaacaaaatccagctctttggatcaatcaataaagttgataaacatctagtcatgttgatcagggaaaaaagagacaagacacaaattaccaatatcaggaatgagaaaggtgacatcactaaagattctacagatattaaaatactaataagaggatatcatgtttcatcatatgtaaataaatcaatgtaatatgccacattaacagagtgaagggaaaatacgtgatcatctcaattgatgcagaaaattcatttgacaaaactcaacacgctttcatgataaagacattcaacaaactaggaatagaaggaaactacctgaatataataaaggtcataaataacccacagttaacatcacattcagtaatgaaagactgaaagatctttcttgaagatcaagcacaagacaaggatgcactcttttgaaatttctagtcaacataatactagaattcctagccagaacaattaggcaagaaaaaataaaataaatccaaaatggaggggaggaagtcgaattgtctttggtcacagacaacatgatgttatatgtaaaaactcctaaagattccacaaaatactgttacaactaataaatctagcaaagatgcaagatacaaaattaacatgcgaaaatcagtgcatttctcaacactaacaatgaacaatctgaaaaggaaggttaaaaactaattccatttacaatagcatggaaaataacagaatacgtaggaataaatttatccattgagccaaaagtcttgtacactgaaaactacaatacactggtgaaagaaattaaagacagcaaaaataaattttaaaaaatctcttgttcatggattagaagactaatattgttaaaatattcatactgtccaaagcaatctacagattcaatgcaaaccttataaaatcccaacaacactttttgcagaaatagaaaaatccaccataaaatgcctatggaataggaaggaaccaagaatagccacagtagtcttgaaaaagaacagaattgaaggtctcacacttccagatttcaaaacttagtataaaactacagtaattgccaggcacaatggctcacacctataatctcagcactttgagaggctgaaataggaggattacttgaccccaggagtttgagaccagcctgagcaacatagggggaccccatctctacaaaatatttgaaagttaattggatgtggtggcatgctcctgtggtcccagctggaatccagcctgggcaacagagcaaaactcagtctcaaaacaacaacaacaacaaaaaaaaagctacaataatcaaagcaatgtagtactggtacaaagacagacatatagaccaatggaatagaatagaaatcccagaaacaattcctcacatacatagtcaaatgattttcaacaaggatgccaagaccattggatggggaaggacgatcttttcaacacatggtactgggaaacctgagaaaaaattaagttgaacccataccttacaacatatacaaaaattacctcaaaatggatcaaaggccaaaagagctaaaaacctttaggagtaaacataatgggaaaatttcatgacattggatttaacaataattccttggatatgacaccaaaggcacaggaaactaaaggaaaaataggcaaattgaactacattaaattgtaaagacttttgtgcatcaaaggacgctatcatcagagagaaaatataacccacagaatgggaggaaatatttgcaagctatatatcggagttaatatccagaatatataaagaacacttataactcaacaacaaaaaatacataaataaatagtaaacacttttgccaataaaaaatgggcaaaatatttgaataaacatttctccataggatatatacaagtggccagcaagaatataaaaagatcctcaaatcatcaattattaaagaaatgcaaagcaagaccacaatgggctatcactttgcacacagtaggatagctatttttaacaaagaagaagaaaagaaaatgctaaatattacagggtatgtagaaattacagtccttgtacaagcattactggtaggaatgtaaaacagtgcagtttctttggaaaatagtatgacagctcctaaataatttaaaaatagtattaccttatgattcagcaattttaattctgactatattctaaaagaattgaaagaaggcacttagaaagatatttgtgtacccatgtacataaaagcattatttacattagccaaaagttggaagtaacccaagtgcttcttgatagatgaggagatatgtgtaatgtgatactgtatacatagaatgggatactgctcagccttaaaatgggaaaaaattctgacacactttaaaacttggacaaactgaagacattatgaaataagcaagtcacagaatgacaaatacaatatgatttgacttatataagtgacttagagtagtcaaattcatagagacagaaagtagaaaggttgttgccagaggctggagaaaggaggagttgtttaatgggtacagagtttcggttgtgcaagataaaaagatttctggagatggatgatggtgatggttgcacaacaatatgaatttactgaatctcactgaacttcacacctataaatggttaaaatcatttgtttcaagaaactttttcatttccttcttaatgtcttcattgacccactggttattcagaagcatattgtttaatttctgtttgtttgtttgtacagtttccaaaattcctcgttattgatttctagttttattccattgtggtcagagaagatgcttgatgttatttccatttttgaatgttttaagacttgttttgtgacctaacatatggtctatccttgagaatgacccatgtgctgaggaaaagaatgtgtattctggagttcttggatgaaatgttctgtaaatattagatccatttagtctacagtgcagattaagtctgatgtttctttgttgattgtctgtattaaagatctgttcaatgatgaaagtggagtgttaaattatccagctattattgtattggggtctattactttagctgttataatatttgctttatatatctggatgctccagtgttgggtgcatatatttttacagatatatatttacagatctgtgggagcaaggttttggaaatgactggaaagagacagaaggtaatcttgtagagtgatggaaatgttttatatcttgatggtggttgtggttacacaggtgtacacatttgtcaaaactcatacaactgtacaataaaatgcactaatgtttaatttatgtaaaatacatttcaatacatttaagggttttcaaaaaagtacatgtattagaatggccaaatattaaaaactgacaataccaattcttggtgaggctgtaaaacaacaataactctcatccattgctggtggggaatacaaaatgatacaaccactttagaaagtttggcagttgcttacaaagctgaacatagttttactatacagttcagtagtcatgctcctatgtatttactcaactgatttgaaaacttgcatccacacaaaaacctgcatttcaatgtctatagcagctttactcataatcacccaaaactggaaacaagcaagatgtccttcaataggagaatggataaacatactgtaatatatccatacaggtggaatattatttagtaataaaatgaatgagccaagaaaccatgcaaagatatgcatgaatattaaataaatatttctaactgaaagaagccagcctgaaggctatactgtatgattctatttatgtgacattctgaaaaaggcaaaattgtagagataacaaataaatcatgattgtcaggggcttgtgatgagatcggggcagttgaataggtgaatacaggggaattttcagggcagcaaaactgttctgaatgatattgcactggtggatatatgatgctattttttcaaaatccacagaactttatattacaaagagtgagtcttaatgtacacaaatttaaaaaatcatttgaggtcagtggatcccaagatgaaatacagaatgtgaaatgaagaattgaactgtgatatcgtttggctctgttgacctaaaagttatgatacctcagtagtaagaagcacccaaatctcatctcaaattataatccccataatccacacatattgagagagaaaccaggtgggaggtgattgtatcatgggagtagtttcccctatgctgttctcatgatagtaagtgggttcttatgagatcttatggatttataaggggatcttcccccttggctccttattcttctctctcctgctgccatgtgaagaaggcccttgcttccccttcaccttctgccatatagtaagtttcctgaggcctcccctgccatgcaggattgtgagtaaattaaacctcttttctttaaaaattacccagtcttggatatttctttatatcagtgtgagaatggactaatacaaaccgtattacaaatgtgtgatgaaaggagatgggagaaaagttaccaacctaagtaactttggaaatgagtgttttttgctttagattgtaggactaaagacagtaagaactgcacataagccttgtactctagttgatacatttgttttccacagggatatgggttagcaaatttgatactaccatacatgtttactggaattcaacaatcaggtaaatggaggcatatggtgggagccagatttctcacaattggagtgggtaggtacacatatgtaaaaggacaaggctagaatgacctatgtggtaatgaagacttgaagacatcagtaggagcttatcttcagcttaaattatataaatgtggttatatagagaaatatggaaagatatgtgcatgtaaatactcaagttagtgtatgtacatatattttgttgttctgtcggcctaaaagctatgatacctcagtagtaacaagtacacttagtgcccagatcttggtctctaataccatttttcaattaaaagaaccagtgctccctgaaaaaatgtctgattctaggaatgagtcaagatatattcaagatgatccttgggcatcccatagtacaacaacataagaaagtgctaagaaaaaaacccactacattataggggtatgtcaaagggatagacatgtcaactgaaagagcttctgataggcagagatagaacaagttaaagaacaaaataaataacttattattggattataaccttgtaagatacaattaattttagcctactaacttccttgtcttttgttctcaaactcaactttcctgttcctccttgcccctagttactgtaaaacagcctatcctttcccatcaggtccaatgaataactcacatctgttcccttggttaccttcccccacccactgttctcccgaaactgcatatctcacatgctccacctctgtaccacacatccctctccccttctatatttagaaaaatatgtacaagtagccaatcgggtcagctcagattgtgcagtctgaccccagcccatgggggagggacacagaagtagggattgtgttaaggatataaaaaactcctagtctcctttgttccgtgtgctcttatgatcttgactgacgcaggtagcatgcttctgcagaagtaaattgccttgctgagagaattaaacttttgcctgagtgctggtttcactttgtggcaccaagcatttattcatagaggatttttatagccaacaacctgaagtataacatacatgtgcatgagtccatacttatgaaatcaaataaatgtaataataaataagagaaaagacacaaatctttcatgtagaagaactagaactgattcatacaggtactttcctctcgatgaagtgcagcataactccccactccttaaaagtgacttccttccaaagagtacagtgtggaaaaggaggaaatagagcaactttatggtagacaaatctgataaacactattgcaaccatgtcagcatcaaaaattatgagtcgtgttgatagtatgaacttttgatgtgacatgatgagaatgccacttcatctctgtagtcttcctccccaaacccataatctcagtctaataatgagaaaaatatcaggcaaactacaattgagggtcattaagcagaatacctgacaattatttttcaaaactgtcaaggtcatgaaaaataatgaaactgttagaaactgacacagccaagaggagcctaaggagacatgttgactaaatgtaatgtgttatctgttctgaataggatcctgacacccaaaaaatggcattaggtaaaaagtaaggaaatctgaatgaagtataaacctgagtaataataacgtatcatattgatttattaattgtgacaaatgcaccaaactaatgtgagatgttaataatagaggaaactggatatgaaatatataagaactttgtggtatctttgcaatttttctgtagtactaaaagtattataaaataaagtttattttttaaaaatctgataactgcccccatcacctgagattctgatttaattgatcagttttgtggccttagcattgggatttttaaagactccctaggttatactaggataggcttgcagccaggtttgagaaatagtggatgagtgcctgaggctgaggacactgagcaagtgccaggaaccacttgcatattgacaatgcttattggccgtaatttaatctcataaaatcatattccctcaacagataccatctccctgcttcttaggataagtgaatggcaccatacaaaatacactgatgtctttaatattgttttagattaaagagcactattcaaaagagcttttgtgatgaaaatgttctacatatacactctccaatatggtaaccactagctacatgtggctattgagcgcttgaaatgtggctagtgtgactgaaaaagtgaagttttaattttatttaatgttaattaatgcaaatttaaatatcaacatatgactagtggctaccatattggacagcattgctctataaaaatgcaatcaggttcctaagagacttcttaatgttcttttttgggatatggactaatttttctcattccgacttttttcttcctacaaattggagtctcctactttctaggagacatttttactttaaaacagcagtacaaatgctatgccactcccccagatttgcaatagaagggtctggcatcatccctgggtcatccccacctgcagtgcctgctgctggctgcagaaagcaaccattgtgccctcggagaagaacgtttcttgtgagcccctgccctgcctccctttcttgagtattttggttccttctaatgctaatttttcaactgctctctctagagttaattccaaactcctaaagttaaaaggaaaacaggttctcctggtggagagatgcagctgttctattatttgtcttcattcaaaaaatagctatcccccagcccattaccatatccatgcatttctactatgctgcacagctaatgactacattaagcatttggaaggtctgcattattgtattactgatagctcagtggctgaatacaattatactatggattgcttaggctgttggggtgatgagaagaaataaactttctggaggggcagtgtagattcagtgttaccacggtggtggggtgccaccggaactgccagatctacatccctattattgaaagcgaaaaccaaagatgagattttagaaatactgcttccatgttggggctacacgcattatcacttacacactatagaggaagttcagctgtctttgttttttagtagatatggggttgtgtggttttaatgatgcaaagaaatggaggaattatggattttcctaaaatgtaacagcttcagcagtcgaaggctgtcccaaggtcatttcactgatcaggaaaaaatctaggttatcatgaacaattagcagacgacaagaaattgagattagcattaaaattagaaattctaaattgggaactgatggccagcaaggcctcacttccccagttttgccgtatccctagaaccaagttcagggtccacagctttaggattttgtgtgtttgcttattttaacagcttcattgagatataatttacatactatgaaatttattaattttaaatgtacaattcaattgtttttattaaattcacagttgtgcaaccatcaccaccctccagttttagaagatttctttcaccacagagagatccctggtgtgcccatttatagtcactacctatttcccccaacctctcccaagacttaagcaaccactaatctactttctgtctctacagatttctctcttttggatagtttatacaaatggaatcactcaaatgcagtatgtataatagtattttgtgactggtttctttcactcagcataatgttttcagggttcatccatgttgtagcatttattggtatttcatgtctttttatggatgagtaatatcccattgtatggatacaacacattttgtttatctattaatcagttgttggatatttatagcttgtttacattttttatatgttatacataatactgctatgaacacttgtgctgggatattgacagagatatgttgaatctacagatcaatttggggaaaattgtccccttaccaatccatgaacatggagtatttctctatttaatgttctttatttcctgtgaactgtgttttgtatttgccagtccacaagtcttgtacttcttttgttaaatttatttctaagttttttattttctggatgctattatcaagtagattattttcttagttatttttacattgctgattgctagtgtttagaaatacaactgatatttttatactgatctctcatcctttaatattgctaaactcattaattagttctaataattttattgtatgtgaattcagaggatttttgtaaaaagaattatgtcatctgtgaatgaacatatttttattttttcttttccaagcttgaagccttttatttcttttccttgcctaattggactggctagaacctccagtatgttgttgaatagaagtggggagaacagacatcctcaccttgtttccagtcttttcctgacatgcagacaaagcattcagtcttcaccttaagtataatgttagctgtacgtttttcatagaagttctctcctattcctagcttcttgagaatttcaatcatgaatggtttttgggttttatcaactttttaatccttccattaagatgatcatgtgataaaatggggaaaggacacctgattcaacaaatagtgctgggataattggcaggccacatgtagaagaataaaactggattctcatatctcaccttatacaaaaataaactcaagagggatcaagggcttaaatctgagacctgaaaccataaacattctagaagacaacatcataaaaacctttctagacattggcttaggcgcagacttcatgaccaagaacccaaaagcaaatgcaacaaaaacaaagataaatagatgggacttaattaaactcaaaagcttctgcatagccaaaaaaaaaaaaaaaaaaacagcagagtaaacagacaactcaccaactcacacagtgggagaaaatcttcacaatctgtacatccagcaaaggaataatatccagaatctacaaggaactcaaacaaattagcaagaaataaacaagtaattccattcaaaaagtgggctaaggacatgaatacacaattctcaaaagaagatacacaaatggtcaacaaacatatgaaaaaatgttcaacatcgctaatgatcagggaaatgcaaatcaaaaccacaatgtgatatcaccttactcctgtaagaatggccataatcaaaaaataaaaaaaaaaaatagatgttggcatggatgtagtggaaagggaacacttttacactgcttgtgggaatctaaactagtacaaccaccaggaaaaacagtgtggagattccttaaagaactaaaagtagaacaaccatttgatccagcaatgccactactgggtatctacccagaggaaaagaagttattatacgaaaaaagatacttgcacatgcatgtttatagcagtaaaatttgcaattgcaaaaaaatgaaccaagcccaaatgcccatcaatcaatgagtgagtggataaataaattgtgatatatacattatatatatatactatacaccatggaatactactcagccataaaaaggaatgaaataatggcatttacagcgacctggatggaattggagatcattattctgagggaagtaactcaggaatagaaaaccaaacactgtatttctcacttataagtgggagctaagctatgaggatgcaaaggcataagaatgatacaatggactttggggacttgggggaaagagtgggaatggagtgaaggataaaagactacaaatcgggtacagtgtaaactgctcaggtgatgggtgcaccaaaatctcagaaatcaccactaaagaacttattcatgtaaccaaacaccacctgttccctcaaaaacctgtggatataaaaaataaaaaaaagatgataatgtgagttttgtccttcattctattgatacggtgtattacttcaattgattctcatatgtttaaccaaccttgcatttctggaataaatcccactcattcattgtgttataattctttctatatgttactggattaattttgtaatatgttgagaattttgcatttatgtttataagggctgttggtctgtagttttttttccttaatatttcattgtctggctttggtataagaataaaactggacttttagaatgtgttgggaagtcttccctcagcttctatctttttttttttttggaagaatttttattaactcatctttaaatgttaggttaaattcactagtgaagccttctgggcctgggcctttgtgtgggattttttaaaaatgctaatttgatctcttcacttattataggcttattcacattttttattttctattcagtcagtttttatagtatgtctttctcggaacttttctattttatttaacttatctaatttattagcaaaattattcaaaacaattagtaaccttgtttttgttttgttttgttttgttggtttgttttgctttgttttgtttttgagacagagtctagctccgttgcccaggctgctgtgcagtggcgtgatcttggctcactgcaacctctgcctcccgggttcaagcgattctcctgcctcagcctcccgagtagctgatttttatttatttatttatttttgagacagagtcgtacgctgtcacccaggctggagtgcggtggtaaaagcacagctcactacagcctctacttcatgggctcaaacagtcaccacacttcagcctcccaagtagctaggaccacaggtgtgtgcctccatgcctggctaatttttaaaatttttctgtagagatgggggtctccctacattgcctaggctgctcttgaattcctgggctcaagcagtcctcccacgtcagcctcccaaaatgctgagattacaggtgtgagccactgcagccagtccttattttcgtaagatcaatattgatgttccctttttcgttcctgattttagtctttcttttctctttttatttgtcagcctgtctaaagatttttcagtattgttgatcttttcagagaatcaactattaattttgttgatttttttctgtttgtctatattctcattactttccactctagtctttattatttcctcttgctggttttggaatgtttatggatttttttttttttagttttttttttttaagatgaaaggtaggttattgatttgagatctttcttggtttttaatataggcttttaaagctataaatttccttctaagcactgctttatagctgcttctcacacatttttatatgttatgccttcttttcactcatcttaatttgttttctagttcttgtgatttcttctttgaatcgtgagttgtttaggagtgtgttgtttaatatctgcctatttagggatttccaaattgttttctgttaatgatttctgatttaattccgctgttgtcagatactttgtatgatttaaatcatcttaaaattattggggtttgttttatagcctaacatacgcctctcctggagaacataccatgtgtagttgagaaaaatgtatattctcctgattttagatggtgtgttctatagatgtctaaaagatctagttggtttatagtgttgttcaagtcttaaatcacattgttagttttccatctagttgttcttagagcttcagacttaactgatgactatgagtgacctctatttgctgtcatgtacactttctccaaaattcatcacaacaaacctctatagtgggtagtattatgactatttttacacataagaaaattgaggctaagagtttaaaatggcttctcaaggacagtcatgataagtggcagagccaagaatcaatctgacatcttctgaactgacatccattgttcattctactgtatcatgttgctcttcatgcacaccttccctgtttatgaactgagtggtctccagttctgactttctcctgacatactgggaatctcacttgactctggaagactgaaatattctgtgtagacagagacaatcctgagggcctggagtagccatgaggacctcttcttgaaggaaatgaaaggtaaaactggtatagagagtaccaccttaaaaaaaaaaaatcccagcctgttttcctgaggtttttcacagtgactatcatttttaaagaagaggccacttacactttcaccagacatgaggcttgggaagaatttagaaaactggtctgatctgacaagaccctcaggcagaggagcatatggtggcagtgaaaggtgaatctgcttaggtcagctcctagaatttgcaggatgtgacagttgattttgtgtcaacttggctaggctatggtgccaagttgttgggtaaaacatcagtctatatattcctctgaatggatcttttagatttaatatttatatcaatagactttgagtaaagcagagtactcttcataatgtgggtgagcttcatccagtaagttgaaggcctttagaaaaaaagactgaggtcctctgtggaagaaagaatttgccttcagattgccttaagattcaagctccaatatcaactcttctttaccaacctacaagcctaccctgcagatttcaaacatgccagtcctcacaagtgcatgagctaatttcttaaactaaacctcttgggagaaacttgactaatccacagggctccagataagattataaatgcaggctcagacaccatatctaaatatttaaaatttgtactaaatatttaaaatttgtaaatcaagctaacaaactgttctatatttctacctaaacaaatatatgtgtacaacaacctggaaagccacattcaaatttaaaatccttggattccttagagttctgtaccaaaatgtggtgacatgaagaggaccagaccccagcaactggcccacctgtccctcttctcttcctactctgggttcacccttcattgtgaggggccttacacatgtttatatgggcccctatagcccatgcttctaagtttcatccacactctccccaaataacaaacagctgcctcctagaaaccccttaagcatacaggtaatcatacaaatgtgtgtgtgtgtgtgtgtgtgtgtgtgtgtgtgtgtgtgtgtgtgtgtgtgtccccaggaatacagaaccaggaatggagtctgtgaactctctggaaataggaatgggcttgcgaacatttaggcagggaattccagcttcccaggtgcccactcagatctagaaggtgaaccaaggattctgtatggttacatctcctcaggtccactgtctccttttcaaagtaaggttctttaaagcacagagaccatataggggttatttttgcatgtgtctaaatgtggcgctaaaccttcaaatcctcaggggagaaagataaggtagagcaaatggctagtggttccagggccttgcccacaggaggcgttgctcttccaagggctcctatccaatcctgaaaatagaaatgggaagtctgggcagtttgtgccaacaggataaccaattaaaccatttccagtgaggcaaggaggggaaacaatctcagagggaataactcattcgtaggctttgcaaacctagactactagtactatgatttgaatatgtcctccaatttttatgtgtttgaaaacttaataccctaattcacatgtttattggaggtgagacatttgggagttacttaggattacataaaatcatcatggtagctttataagaagagcaagagagacctggtatgacgtgcatgctcttgccctctcaccatgtgatatcctacaccatgttttgacacagcaagaaggccctcacaagatgctagtgccatgctcttggactgttcagcctgcagaactgtaacaaataaatttcttttctttataaattacccattcttgggtattctgatatagttacagaaaataaaatgagacaactagttacctccactttcctgtcttattttctccagtcaggttgcaacctgcatcccaaaaatttcatccatagacctatggtttaataggtctacaggtctccaagatcctgtggctgggacaaaaagaaacctattctgagtcaaggacttcctggctcaaggatctcctcactggtttatccaaaggtaattcccatttaaatggttagtgaacaccaagacaactgcttagtagctgttcccctactggtatagattacctaaagtctctcccagaatagagttccagcacatttccacctttccaatgagctgccaggtttgactggagccagtaactgtttattcatgcgtgaccaggctgctgatagagaagtagtgcaatgcagaaaggcattcagcactggaccacccatgaatgagtgtgcttatgtgttgtaattcccttggtgcaggtgggcatctgatactcattcattcagcacaaagggctaggccagggctcaggaccaactcagcagcagcaatctgtcatctgtcacacaccttcttgtgttgcctttctcaggttggctgcagcctctgagccatgaccccgtaaccatttcaaagatagccatggacactagaactctgtttcagaagctttaagacgtctctaggagaggggtggcaaccaagttattttatgcatgctaacaccaggtagcacagtataaacaggcacaaattagaaatattttgaagaaagagaagggattgagttaacctatgaacagtgatgtggacagttgctttcatgaaaaaagaaacatacagcaaatgaggccccagctaactacctattgtatgtgtctacattacaaagagagagacagaaaggattgaatttgagagtgtgaaaataaatagggaagaaatgtgttgggccacagcctcccagagagtggctccctaggtcccattcacagcactgatttaacttccttcaggatttttttcaatgcctattttcctttccactgctctgtttaaaaagaaatgtaataacatttctttttaataacagaaaggaggttatttttgataagtttggggcttttaaaccactagttcatttaacaaacacttcctgagttatactgtgtgctaatccatatgccagaggttgagactatcttgctgaataggataatcatggctcctgctctcatagggtttaccttctattggatgagagtgagaaaaacaaaaataaacacataagtataataaaaatgttatcaaataataataatgcctatgaaaacaaagtggtaaaatggccagcaactgtgatgaggtagtcagagaaggcttctctcaaaagataacctgtgatctgagaattgaatgatgagaagaagaaatctgtgtaaatacctgggggaaaagcattgcaggtagagggaacagcagataaaaatgccctgaggcataaatgaccttaaagtgtccaaggagatgcaaaaagaagaaggagaagaaagagaagaggatgaaattggagaggcaggtgaaaatgggccatctaggacctagtagtctatggtaacatattaggattttattgtaagtaaaattataatttactggaggagtttatacattcgccccaccttctttaaataatagcacctcagttttttattgtaaatatcttctttcctccattgaaaacagtccagtgggactaacagtctcaatgctctgctagatcctagccaaagcagaagcctaaatcaatatgtattttgtctagacatgtttttcttttgattttatgacagctttattgagatataactcacatatcatccaatttatttatttaaaatggacaacttcatggtttgtaatatgttcacagatatgtgcaatcctcactccagttaagaacattttaattacctcaaaaaaaaaccctgaactctttagttatcatccttctactctctctcctctccctctcccattctaatcaacaactaatctactttctgcctctgtagtcttgatttgatggacatcaaatataaatggaatcatatgcgatcttttttgactggcttcttgcacttaccataatgctttcaaggctcatcaacactgtagcttgtatcagtacattgttgcttttatggctgaataatattccattgtatgtataccacattttgtttatccattcttcagttgatgaacatttggaatgtttctatcttttaactgttacaaataatgctttgtggacatttgtgtagaagtctttgtgtggccatgttttaaattatcttgagtgaaaaccagatttgctatcatatggccactttgtgttgaacattttgaggaactaccaaactggttttcacagtggctgtgtcaatttaaattctcaacaaaaatgcatgaggactccaattgctctatatcctcaccaacacttgtgcagatggactgaatgtttatgtctccccagaatttttatgttgaagcctaatcatcaatgtgatagtattaaaagttggggcctttggcaggtgtttagctgataagggctctgcctttatgaatgagattagtgcctttacaataataactctggggaactagctagcccccttccactatgtgaggatacagtgggaagtcatgaactatgaaccagagagtgagccctcaacagacacaaaatctgacagagccttattcttggacttcctagcctccaaaactgtgagcaataaatttttcttgtttataagttacccaatcaaaagtattttgtcatagcagaccaaacagactaacacaacttattttcctcttttttcaaaaattacagccatcccaggagttgcaaagttgtacctaattgtggttttgatttgtgtttccctgatggctaattatgttgagcattctttcatgtacttactggcccctgtgtattctttttggagacatgtctattgaaatcctttgcccatttttaattgccttgccttttaattgtttttcaattgtttacctgttaaattcatcaagtattgtttccaatcataacagtatgaaactacaaatcaataacaagaaattttggaaaattgacaaatatatataaagtaaacagtatgctcctgaacaaccaatgaatcaaagaagaaattaaaaaggaaatttagaaatatattgagacaaatgataatgaaaacaacatatcaatcctatgatgtgcagcaaaagcagttctaggaggaaagttcatatcaataaatgcctacattataaaaagaaagattacaaatacagagcctaacattatgcctcaaggagctagaaagggaaggaaaaaactaaactcaaatttagcagaaggaaagcaataaagataagagtaaatatgaaaacaaatatattgtgggtgctatattattatcagatatacaatttgcaaaaattttcttcaaagactttaattatgatatgccaaagattttactcatgatgaattccaatttactttttttagttgcttgtgcttttggtgtcatatacaggaaactattacatagttcaaggtcacaaagttgtatacctttgttttcttctaagagttatataatgttagtgcttatatttaggttttaatatattttgagttaatttttttatatggtgtgagggaggaattcaaatccttctttgcatgtggatgtccagttgtctcagcaccattcactgaaaaaaactagttgatagatcatagatataatttttaccatagacttctcaattcagttccattgatctatatgtctatctttaagacagtaccatatctgttgattactggagatttatagtaagtcttaaaataaagaagggtgtatccttcaacttccttctcttccaaaatggtttaaattattcttggttccttgcatttccatgtgaattttaggatcagcttatccatgtctaggagtatctttttcattcttttactttcaatgaattaatgtttttgaacctaaagtgtctcttatagacagcttatagctggataaagttttgaactaaattctgcaaatctctgccttttaattgcaatgtttaatctgtttacatttaatgtaattattgataaggcaagatttatgtctgctattttgctatttattttctatatgtaatttatttttgtttctcaattcctccattactgctttgtattgtgttaaatatatatttcatagtgtacaatttttatttgctgtcatttcttttactgtgtattttttagttattttcttagtgtttttcctgaggattacccttaacatatcaatttataaaattctagtgcagattaattccaacttaatttcaatagtgtacaaagaccttactcctttgtggaacttttccttcttatactaatatagtcaaaaattatatctttatatttgtgtgactctcaactagatttataattatcacatcatgcagtagtcttaagtcaaatagaatagaaatggtattatactgaaaaatgcacttatactggtttagatcacctacatagttatctttaacagttttttaaatttctttatatggatctaggttgcaatctagttttcttttatttctgtctgaaggtctgccagttacaaattctctcaactttttgtttacctgggagtatcttactttcttgtcttttaatgacagtttttctgtgtacagaattcttggttgacagtagtttttattttttctcagcattttgaaaatgttatcacagttttctgcctccatggtctctaataagaaatcagctgttgatctcattaaagctcacttgtaagtgatgagtcacttctctcctgctgttttcaaggttctttctttgtctttggataattttattatgctgtgtactggtgaagatctatttgtgtttctcatatttggagttcattgagcttcttggatgggcagattaatttcatcaaatttgggatgttttttcattgtatcttcaaatactatattaacatctttctttcactccttttctgggacttccattatgcatattttggcacacttgctattattgcacaagtcactgaagccttgttcatttttcttcatcttttttctttctgttcctcagactagaaaatctcaattgaactaatttcaggttacttattcttctgcccactcatatgtgctgttgagccttccttatgaatttttcatttcaattatttcaattcaattatttcacaccccagaatttttatttggctctttttaacttatatttctttactgatggtctctatttgttgtgacattgttcttatactgctctttagtgatttagacatggcgaagtttagctttatgaatatatgtaaataggagatctaaagcttttgcctagtaagtccaattttagggcttcttcaaggattatttccattgattgcttttatacttgtatatgggtcatacattcttatttcttttatgtcacataactttttgttgaaaacacaagagttcaagtaataatatagtttagatatttgctctgctcaaatctcatgttgaaatttaatccccagtgttagagattgagtcttgtgggagttgtttggatcaaaggggcgaatccttaattaatggtttgggctatccccttggtgataagtgagctctctctctgagttcacacaaaatctagtcacttaagagtttgtggcacctcctcctcaactctctgtctttcactcttgctttcaccatgtatgatgcctgctcccccttcattgtctaccaggattgtaagcttcttgaggcccccctagaagctgagctgatgccagcaccatgctttgtgtaaagcttgatgggctgtgactcaattaagcctccttcctttgtaaattatccagtctcagttatttctttatagcgatgtaagaacagcctaacacatacaaaaagttggtaatgaggagtagggcattgctacaaagatacctgaaaatgtggacactactttggaactggataaaaaaacagaggtttgaagagtttggagggctcagaagcagacaggaagatgatggaaagtttgagacttattaaagactgattaaatagttatgactaaaatgctgatagagatacagacagtgaaggacaggcttatgatgtcttaggaggaaatgagaaatttattgggaactggagcaaaggtcaagcatgttatgctttagtaaagagcttggctggatttttcccatggcctgtggactatgaaagtttaaacttgaaagcaatgacctacaggatctagtggaagaaatttctaagtggcaaagtgttcaagatgtggcctgggtgcttctaacaacctatgctcaaatgtgggagcaaagaaaagacttaaaattggaacttatatttaacagggaagcagagcataaaagtttgaaaaatttgcagcctagtcatgtgctaaagaaaaagctttttcaggagaggaattgaagcaggctgaggagcaaccacttgatagagaaatttgcataactaaaaaggagccaagtgttaataactaagacaatggggaaaaagcctctaaggcattcagaaatctttcaggcagcccctcttatcacaggctctgaagcctcggaggactgaatagtttcatgggccagacccaggttcctgctacactgcacagccttggacactgctacttgcatccaggctgctctagctccagccatagctcaaagggacccagatacagctcaggctgccactttggagaatgcaagccacaggcctttgtggtttccacatggtgttaatcctgacggtgcacagagggctagagtgaatgaagcttgggaacctctgcctagatttcaggaaatgtatgagtaatcctgggtgcccatgcagaagtctgctgcaggagtggaaccccagagagaacctctactaggggagtgtaaagggaaaatatgaggttgaaacatccacacagagtcctcaatggggccctgccttgtgaagctgtgggaagggtgccaactgctctttagacccaagaattgtaagtcttctgggagcttgcaccctcagcatggaaaagctatagtcagtcaactccaggccttgaaagctgcctcagggactgaaccctacaaagccatggggcagagctgcccaagtccttgggagcccactctttgcactagtgtgccctatatgtggaacatggagtcaaagacaattattttggaacattaaggtttaatgactgccctgctgagttttgaacttgcatagggcctgcagcttttcttttggcttatttcttcattttggaacaggaatgcttacccgatgcttgtacttccattgtatcttggaagtaaagagcttgtttttgattttacaagctcataggtggaagggacttgccttctctcagatgacattttggactttggatttttgagttaatgctggaattagttaagacattggggggactatttctcaatagctaagtatactttaaaatgtgagaatgacatgagatttaggacgagctggggtgaaatgatatagtctagatattctacccacccaaatctcaagttgaaatataatccccaatgttggaggtggtgcctggtgggaggtgtttggatcacggaagcagatccctcatgaatggcttgggctatccctttgctgataaatgagctctcattctgagttcacacaagatctggtctgtggcctcacatgtgacattaaaagtgtgtggaggcctgcacggtagctcatgcctgtaatcccagcactttgggaggccgaggcaagaggatcacctgaggtcaggagttcgagaccagcctggccaatgtggtgaaaccccatctctactaaaaatgcaaaaattagctgggcatggtggtgggtgcctgtaatcctagctacctactcaggaggctgaggtaggagaattgcttaaacccaggagatggaggttgcagtgagccaagatcgcaccactgcattccaccctgggtgacagagcgagattccgtctcaaaaaaaaacaaaaaaagtgtgtggcatctgttcctccccctactctctctctctcgctcctgctttcaccatatgtcttccttgccccccacttcaccttccgccatgattgtaagattcctgaggccttcctagaagccaagcagatgccagcaccatgctttctgtgaagcttgcagaactgtgagccaactaaagcccctcttctttataaattacccagtctcagttatttttatagcatttcaagaatggcctaacacaaatgatataatgtggcaattctcgaaatcaaattatccctatttccttggcggtttttggtgttgcttaatgtttgtttgcttgtttagtgacttttctgaactatttctatagtcagtagtttttcttgtatgtagccaccacaaaagtatctattcttttagtttaacagttggctagtgattggacagatattttcttaaccatagtaagatactgctgcatcccaaattttcttagcaaaaaatatggcatattccatattggggctgtggcatttaaacaccattatttcagtgtttggaagttttgtcaaattttattagggttagttttgggtcctttcttagatcatttaattgcttgttacatagtctgaaggaaagcaaacaccactatgaaataggtggcctggagatggtttctttgtccaccttttataggaagtgatactgtcacccaacacacattacacttctccccatttgtgttctggcaacctaaaccctaatgttatccccatgcacatatgcacaaatagaaacaccaagcccatttctcttcttgcctatgggttataatgttaagaatggaaatttttcttcagtgctcaatcctcacctagtccttatccccaatgtttggctcatggtaggcctgcaaatatgtctacctgtcagtatataaacctactggcaggtcaaccccctccaattctcctggacctcactttgcttctgtctcacaaacttgcctcttcccttccttctctcttttcccacaatcagataacttacagaaatacatacacatgttctgaaataaagggtttttcataacatgttgattttgttttaattaccaccatcgctgtttcattatgctgttgtatcttgtaggagtgtcatttttttttacagcatcttgggcctggcctgagtgctttggctcctactcaatctttgctagtggccgattcttggctcttttcactctttttaccttttgtggaatttctgtactagtactagacgatttttttcttgaactcccatgaagcagtcgttttatcaccctctgtatcttcttcacctgaaagggcaatagagtgatcacaaaaggaccttgtgttcgaggaaggagataggcactgaatgagaagaggagctttgtaaaaagggacatgggctaatgagggggtttgtgccaggcaggtaaagcgtaggagacataggggagggtggatcaagagaaaagagcttgagtgaggtggtctcaccttgcccccttttctggccctgggttgacaggatttcttcatcttgttcttcccttttgtgcttgagattaattgttctgtgcttgggtttgattgctccataactttgctagatcccttcaactttctggtaactttagccatgttgaaaccccacagtagtcttctctaccagcatataaaatgcccatcatcaggacaatgaggagccacaccctttagctttatttgttcatctaggcacttcccctggccagtaggggttaaaggagctgtagacatcacaaagcactcttggcttctgcctaatggtggggatgctggggagatccatgtgctctggttggagacaggggcatatccttaacatcccactaaaaagccttcccaaaatgacctgtaatcccttctcatcacttgtacagatggcaagaaaaaagtgatgcctccaagtctttctccatagccactcccattccatttttattttgttctctcccatccttcatcatgacctaatattttggatatcttacctaaaatctctccaagaaaatgtgattatatttaagtttctgtgtagatataaatcacctcattccccttcaaaagatttatcttatgcaccttgaagacaatttcattcttggctactacacaaaacttcccatctcaccttctttttccaatgtctgtatagacctcttcagttttctagtttcagattgacatagcagctcttatcagtcatgaaaatattgtgatactggcataaggacagacatatagactaagagaatagaagtaagaggccagaaataatcccacatatctatgaaaaattgatttctaacaagggttcaaagacaagtcagtggagaaagaatagttatttcaacaaatgatattgtggcaactggatattcacatgcaaaatagtgaatttggaccctaaatcacatcatacacacaaattaatttaaactggatcaaagagcttaatataagacctaaaactataaaattatttgaagaaaacataggctaaattcttcatgacccttcattcagcaatagtgtcttatagtataacaccaaaggcacaagtaacaaaagaaaaatttgataagttgacatcatcaaaatcaaaaccttgtgattcaacagttaaaattaagaaagtgatagacaatgcacagaatgggaaaaaaattttgcagatcatacatcagtaagtgaaattcatgtaaaatatataatataaagaactcttacaactcaataataataatgttacccaacttaaaaagtggacaaggggtaggaaaaacatatctcaaatggccaataagcagataacgatatagtcagcatcagtagccatcatgaaaatgcaaatcaaaaccacaatgagatactgctttacatgcactaggatggtaataataaaaaacggcagataataagatttggtaaagttgtgaaaaacattagccctcatatcttgtttgtgggaacataaagtggtacagaagttttaaaatatagtcagccaggtacccaaaaaaagctaaacatagaattatcatatgatcctgaattcccactcctaggtatgtaccaagaaaaatgaaaattatattctcacaaaaacttgtacaggaatggtcacagcagcattattcctaatggccaaaaggtggaaacaacccaaatgcccatcaacttgaaaaatggataaataaaatgtggtataggaatataacagaatattgttcggtcatagaaaaaatgaaatacagatatatgctgcaacatgcataaatgtgaaaatattatgctaagtgaaagaagccagtcacaaaggattacatattgtatgtttccatgggtgcagcacatcaacatggcacatgcatacatatgtaacaaacctgcatgtggtgcacatgtaccctagaatttaaagtataattaaaaagtatatctataaaagaaatattcacaataggcaaatttatagacagaaaagagattagtagtgccttaaggtgaccaagtaatgaggaaatttagaggtgacaacaaagggatgaagtggtgttgtttggaattatgaaaatattctaaaattgattgaagagatggctgcctaactctgtgcatatattaaaagccattgaattgtccactttaaatgattgaattgtataatatgtaaattatattttaacaaagctgttaaaattaatatgaattttcctcatgaaaggaattcaataggcttcaggctggatgtggtggctcacgcctgtaatcccagcactttgggagatcgaggtgggcagatcacttgaggtcaggagttcaagaccttcctggccaacatgatgaaaccccatctctactaaaaatacaaaaattagccagatgtggtggcacatttctgtagtcccagctactcgggaggctgaggcaggagaatctcttgaaccctggaggtggaggttgcagtgagctgagattgcaccactgcgctccagtatgggcaacagagcaagatgccatctcaaaaaataaacaaacaaacaaacagaaagtaattcaatagggtttgaatctcggctcttccacttacaagctgtgtgaccttaggcaaattagtttccttatctgtaaaagggagttaataacacctaccttataaagttattttaagggttaaattaaatattttcaaacatgaaaatatgaagaccctaaaaataaatctgtggactcttgagaacatgtcttttggactcaagtttgaaaaacactgccactttagttcataacgatcacaaataccagtggtaaagcagacgctgaagtcatgtgtcacaattcatttatgaagtggtgccccaaataatccagaacccatgtatgcattaaaatgtaaatagaacattttatacttaccacagagaactcactgaccctaacattccccttaagaatatatgcacaacaattgaaatttttatatactgctggaggagggagtgtaatgtgttataattactttggacaactggttgagccagtatctactaaagttaaaaatatccatgcattgttatcaaataattccactcctagggggaagacatatatatatatcatatatataatatatattatattatatatatatcatatatataatatatattatattatatatatatcatatatataatatatattatattatatatatatcatatatataatatatattatattatatatatatcatatatataatatatattatattatatatatatcatatatataatatatattatatcatatatatataatataatatattatatatattatattattatatattaaatatattattatatataacatgttatatatgttatataataacatatatattattataataatatattatatattatatatgtcttatatattatatattatattatatattatatatgtcttatatatatcagaataatagatacatattaacctgaaaatgtatgaagacaaaagtataaaagtgcataaatcataagtcaacactcgtatgtaaccatgaccctggttgacactgccagcatcccagaaaccaccctcacaccctcagatgtctccaaatcactacttctccttcctcccccaaaaaaaccaatcttaacttctacaacatagagtagttgtgctttcttttaaactttatatatatggaattgtacagcatatatattttttatgcttggcttcctttgtgcaatacaatgtctatgaggttgattgatactgtgtgtatactggagttcagttttgtcattgctgaatagaattaattttcatgtgactgtatatgcatttatttattctactattgatgaacattgagtttgttttcaaacgtcatgcaaaaacaaaattgaaaaaaagacatgtgctgataaaagaccataaaaatacttcattgccaacaaatcagcactacaaaaactacttttgaaaaagttctcatcattaatcattagaaaaatgcttaaatcaaaaccacaataagatatcacctcaattaagtggattaaattatctaatcaaaagatagagtgtttaaatggaccccccaaaaaaaaagagccaattatatgctccctgcaagagacccactctacctcaaggacacatataggtgaaggaatggacaaaggtattccatgcaaatggtaaccaaaatagagcataggtggctatacttatgtccaataaaatatacttcaagtcaaaaactgtcacaagtgacagataaaatcattatttaatgataaagggctcaattcatcaagaggacataataattataaatacatatgcacagaacattggagcaccagcacctaaatatataaagcaaatattaatgaacattaattaatagataacaatacaataatagtaggggattttggtacccaactttcaacaatggacagaaaaactagacaaaaaattaataagaaaatactggaattgaactgcactttagacaaaataaacctaacagatatatacagaactttccatccaatggcagcagaatacaccttcttctctagtccacatggatcattcttcaggatagaacacatgtgaggccacaaaataagtcttaacaaatttaagatcaaattcatcaagtattgtttccaaccataatggtatgaaactagcaatcaataacataaaattttagaaatttgacaaatatgtataaacagtatgctcctgaacagccaatgagtcaaagaagaaatcaaaagggagtgtgtagaagtgtcagagtacagctccctctccctctccctctccctctccctctcccctctcccctctcccctctgcctctccctctccctctccccacagtctccctctccctctctttccacggtctccctctcatgctgagccgaagctggactgtactgctgccatctcggctcactgcaacctccctgcctgattctcctgactcagcctgccaagtgcctgcgattgcaggctcgcgccgccacgcctgactggttttggtggagacggggtttcgctgtgttggccaggccggtctccagcccctaaccgcaagtgatccgccagcctcggcctcccgaggtgccgggattgcagacggagtctcgttcactcagtgctcaatggtgcccaggctggagtgcagtggcatgatctcggctcactacaacctccacctcccagccgcctgccttggcctcccaaagtgccgagattgcagcctctgcccggctgccaccccatctgggaagtgaggagcgtctctgcctggccgcccatcgtctgggatgtgaggagcccctctgcctggctgcccagtctggaaagtgaggagggtctccgcccggccgccatcccacctaggaagtgaggagcacctcttccctgcggccatcacatctaggaagtgaggagcgtctctgcccggcgcccatcgtctgagatgtgaggagcacctctgcccggctgcgaccccgtctgggaggtgaggagcatctctgcccggacgccccgtctgagaagtgaggagaccctctgcctggcaaccgccccgtctgagaagtgaggagcccctccgcccggcagccgccccgtctgagaagtgaggagcctctccgcccagcagccacccagtctgggaagtgaggagcatctccgcccggcagccaccccgtccgggagggaggtgggggggtcagccccccgccccgccagccgccccatctgggagggaggtgggggcgtcagccccccaccaggccagccgccccgtccgggagggaggtgggggggtcagccccccgcccggccagctgccccgtccgggagggaggtgggggggtcagccccccgcctggccagccaccccgcccgggaggtgaggggcacctctgcccggccgcccctactgggaagtgaggagcccctctgcccggccaccaccccatctgggaggtgtgcccaacagctcattgagaacgggccaggatgacaatggcggctttgtggaatagaaaggcgggaaaggtggggaaaagattgaaaaatcggatggttgccttgtctgtgtagaaagaagtagacatgggagacttttcattttgttctgtactaagaaaacttcttctgccgtgggatcctgttgatctgtgaccttacccccaaccctgtgctctctgaaacatgtgctgtgtccactcagggttaaatggattaagggtggtgcaagatgtgctttgttaaacagatgcttgaaggcagcatgctagttaagagtcatcaccactccctaatctcaagtacccagggacacaaacactgtggaaggccgcagggtcctctgcctaggaaaaccagagacctttgttcacttgtttatctgctgaccttccctccactattgtcctatgaccctgccaaatccccctctgtgagaaacacccaagaattatcaataaaaaataaataaattttaaaaaaaagaagaaatcaaaagggaaatttagaaatatattgagataaatgacaatgaaaacagcatatcaaatcctatgatatgcagcaaaagtagttctaggatgaaagttcatattaataaatgcctacattataaaaagaaagattacaaatacagagcctaacattatgcctcaaggaactagaaagggaagaaaaagctaaactcaaatttagcagaaggaaagcaataaagacaagaataaatatgaaaaatagaaaatataaaaccatagaaaaaagcaataaaattaaaatatttttcctacctaaactagaaaaaagagaagtcttagatatataaaatcagaaaacaaagtggtgatattacaataaacatctctgaaataaaaagaatcataaaaaactattataaacaattatatgccaacaaatttgatagcccaaagaatggataaactcctagaaacacataacttccaagattgaatcaagaagaaatagaaggcctgaatagacaactaacaaaaaaaatgaggtagtaatttaaaacctccagacaaagaaaagcttagaaccagatagcttcacaggtgaatactaccaatcttcaaagaagaattaataccgatacttcttagattcttcaaaataataggatgcatggactatttcctaacatattttatgaggccagggtcaccttgaaagctaagaatacaaagacaatgcaagaaaacaatgctacaagccaacatatctcattaacattgatgcaaaaatccctaataaaatattagcaattatatttcaacatcacatgaaaaagattatacttcatagtaaaatgggatttatccctgagatccaagactgatttaacattcttgaatcagtgtgatacatcacattaaccaacgtaagacaaacccacatgattatatcagttgatgcaaaaaagtatttgagatatgggaggaaaatggcagatagaagacaggactaacatgcagctcccattttgatggacaaaacagcatatggagaatcacactatgaatttttgatccaagaaccactgcaggaatataccaggacaactgaaagaattcacagatgctttgaaagaagtggcttgccacggcaaactccatgagacagctgaaaaactgtaagttcccaaagtgtgaggggtggggggatgtacgcctccaaaaacacatccccactggagaacctgaaaatccaaatcacaggaaaggatttaaccttacttagagatgaaacggatttagggagccaagcaaaatataaaagtagaagaagcagtgagaagagccctgtaggcccttccagtccccagctcaagcccagggaagccatttctgacattatctcacaggtgtccttggggagggcagctggtataatttgggaggggccatagggtgaaggaagcttctagcttaactttgtaatgatttcaactgagcatgaattttcctaagcaggatacaggaatggtgcaaatgagaagtgcagatatgagtgcagaagctgcagctgatggtgcaggcaagtggggaggggtgaagcctgagaggcctgcttgctttctcagcagggtggcttgtagcctggggcaagatcttagccctgctcaccagctgcctggatataaactcagtgctattgatggagcatggcaggagtgagactggccttgctagatgcataggagctgggtgaggcctgtcactgccagctttcccctacttccttggtgacttatattacatagcataggcagccataattcccctgggatcataactccattggcctgagaaccatgcccccatcccccacagtggccacagctagccccacccaaggagagtctgagctcagacccacctaccctgtcccacctaatcatttttctctatctaccctgatagccaaaatcaaaagacataaatgcttggcagctctaaactcataaactatggttccacccattgcccaagaaacccaattacttatcctgaccaatgtagtgtaagctcatatccccttctactaccacagctggtgctctcttgagagtaccacctcctggctggtggccaacaaattcaagccattatggcaactcataacagtacaaccctgctccaaagaaggagtaaacaacagctaattcaactgcctgcaacaccatggtatggctaaccggggcttctgagtctgtttaggtgacaacatcactgctagcataatcagcattccagaacaacagttcactaaacaaaactacagccaaggactcccactgagtccacttcactcccctgccaccttcaccagaacaggtgctggtatccgtggctgagagactggaagacagatcacaacacaggactttttggatatattccccagcagcagctgggagcccagtagccctactgggtggctagacccagtagccctactgggtggctagacccagtaggacaaaaacaatcactgcagtctggctctcaggcagccccaccccaaggggaaaggggagagcaccacatcaagggatcaccccatgagacaaaagaatttgaacagcagcccttcagtttgatatctttccattgaaaacagtctcccaaatgagaaggaaccagaaaagtaattcttgtcatatgacaaaacaaagttctataacacccccaaaagatcacagtagttctccagcaatgaatctaaaccaagaataaatctctgaattgccagataaagaattcagaaggtggattattaagctactcaaggagctaccagagaaaggtggaaaccaacttaaggacacaaaaaacaatacaggatatggatgaaaaagtctccagagaaatagatttcccaaagaaaagacatgcacaacttctggaaatgaaagatacactttagagaaatgcaaaatacactggaaaggtttgataatacaattcaaaaagtagatgaaagaacttcagaacttgaagacaaggctttcaaattaacccaagccaacaaagataaagaaaaaagaatttaagaaaatgaacaaggcctccaagaaatttgggattatgttaaatgaccaaacataaaaataattggtgttcctgaggaacaagagaaatttaaaagtttgaaaaccttatttgaggaaataatgcaggaaaatgtccctggtctttctagggatctagacattcaaatagaagaagcacaaagaatacctggaaaactcatcacaaaaagatcatcacctaggcacatagtcatcaggttatctaaagtcaagacaaaggaaaggatcgtaagtgttgtgaggcaaaaacatcaggtaatctatggaaaaaaaaaaacctatcagattgacagcagatttctcagcagaaaccctacatgccagaaggaattggggtcttgtcctaaaccttcttaaggaaaataattatcagccaaaaatgctgtacccagcaaaattaagcatcataaatgaaggaaagatagtctttcagacaaacaaatgctgagagaattcaccactatcaagcaagcactacaaaaaaaaaatgctaaaaggagttaaaaatcttgaaacaaaacctcaaaatacaccaaaatagaacctccttaaagcataaatctcacagggcctgtaagatgataatacaatggaaaaacaaaacaaaacaaaacaaggtattcaggcaacaagcagcatgatgaataaaacagtgcctcccatcttaacactaagtttggaagtaaagggcctaaatgttccacttaaaagacacaaaatggcagaatggatgaaatccaccaaccaagtatctgctgtcttcaagagactcacctaacacataaggactcacataaacttaaggtatagaggtggaaaaatatatttcatgtaaatggaaaccaaaagcgagcaggagtagctttgtttatatcaggcaaaacagactttaaagcaacaacagttaaaaaacaaaaagagggacattatataatgataaaaggattagtccaagaggaaaatattacaattctaaatatacatgcacctaatactggagctcccaaatttataaagcaattactactagacataagaaatgaaatagacaacaacgcaataatagtggaagaattcaatactcttctgacagcactagataggtcatcaagacagaaagtcaacaaagaaacaatagacttaaactacaccctagaacaaattgacttaacagatatttactgagcattctagccaacaactgcagaatatacatacttattccccaagacagaccatatgagagtccacaaaacaagtctcaataaatttaaaaaatttgaaattttatcaagtactctctcagaccacagtggagtaaaattggaaattaactccaaaaggaatgctcaaaactatacaaatacatggaaattaaataacctgatcatgaatgatcttagggtcaacaatgaaatcaagatggaaatttaaaagttctttgaaccgaatgataatatgacacagtctatcaaaatctctgggatacagcaaaagaggactacgaggaaagttcatagcattaaatgcctacatcaaaaagtctgaaagagcacaaatagaaaatctaagctcaaaccttaaggaactagagaaataagaacaaaccaaacccaaacccagcagaagaaaagaaattacaaaaatcagagcagaactaaatgaaattgaaacaaacaaaaataaatacaaaagataaatgaaacaaaaaactggttctttgaaaagataaacaaaatcgatagactgctagtgagattagattaaccaagaaaagatgagagaagatccaaataagctcaactagaaatgaaatgggagatattgcaaccaataccacagaaatacaaaagatcattcaaggctactatgaacacctttatgcacaaaaactagaaaacctagagaaggtggataatttcctagaaatatacaaccctcctagattaaaacaggaagaaatagaaactctgaatagaccaaaaacaagtagcaagattgaaacagtaagaaaaaaaaattgccaacaaaaaaaaagtccaggaccagatggattcacagctgaattttatcagacattccaagaagaatttgtaccaatcctactgaagctattccaaaagatagagaaaggggaaatcctccctaaatcattctacaaatccagtattaccctaataccaaaaccaggaaaggacataacaaaaaaaaaaaagaaaattgcagaccaatatccccaatgaacatagatgcaaaaatcctcaacaaaatattagctaactgaatccaactgcatatccaaaaaaataatacaccatgatcaagtgggtttcataccagggacacagggatgatttaacatacacaagtcagtaaatgtgatacaccacataaacagaattaaaaaccaaaattctatgatcatctcaatagatgcaaaaaaagcattgacaaaacccagcatccctttatgattaaaacactcagcgaaataggtatagatgagaaatatcttaaagtaatgaaagccatctatgacaagcccacagtcaacattataccaaatggggaaaagttgaaacattccccctgagaactggaacaagacaagggtgctaattttcaccacatgatgaatagaaccatacctcacatagtactggaagtcctagccagagcagtcagacaagagaaagaaataaagggcatccaaattagtaaacaggaagtctaagagtaactgattactgatgatattactatatacttagaaaaccttaaagactcattcaaaaagctcctagatctgataaatgaactcagtaaagtttcagaatacaaaatcaatgtaaaaaatcaatagcactgctatacactaacagtgtccaagctgagaatcaaattaagaattcaatcccttttacgatagctgcaaaataaaataaaatacttaggaatatacctaaccaaggagatgaaagttctttacaaggaaaactataaaacactgctaaaagaaatcatagacaacatgaacaaatgaaaacacatcctatgctcatggataaatagaatcaatattgtgaaaatgaccatattacctaaagtaatgtataaatttaatgcaattctcatcaaaatgctattatcaatcttcacagaactataaaaaacaatcctaaaattcatatggaacaaagaaagagcccacatattcacaagactaagcaaaaagaacaaatctggaagcatcacattacctgacttcaacctatacatggctatagttaccaaaacatcatggcactgttataaaaacaggcaagtagaccaatggaacagaatagagaaaccagaaataaagccaaatacttatagtcaactgatctttgacaaagcaaacaaaacataaagtgggaaaaggacaccctattaagcaatggtgctgggataattggcaagccacacgtaatagaataaagctgtatcctcatctctcaccttatacaaaaagcaactcaagattgatcaaagacttaaatctaagacatgaaaacataaaaattctaaaagacaacatcagaaaaactcttgcagacattggcttaggcaaagagttcatgaccaaaaaaccaaaagcatatgcaacagaaacaaagatttaaaaaggggagacttaattaaactcaaaagcttctgcacagcaaaagaaattatcagtagagtaaacagacaacccacagggtgggagaaaatcttcacaagctatgcatccaacaaaggaataatatccagaatccacaaggaactcaaataaattagcaagaaataaacaaataattttatcaaaaagtggactaaggacatgaatacacaattctcaaaagaaggtatacaaatggtcaacaaacatgaaaaaatgctcaacatcagtaatgatcaggaaaatgcaaatcaaaaccacaatgtgatagcaccttactcctgtaagaatggccataatttaaaaatagataaatagatgttgccatggatgtgatgaaaagggaacacttttacactgctggtgggaatgtaaactggtacaaccactatggaaaacagtgtggagattccttaaagaactaaaagtagaactaccatttggtccagcaatcccactacttggtatctacccagaggaaaagcagtcactataagaaaaagacatgtgcacatgcatgcttttagcagcacaattctcaattgcaaaaatatggaaccagcctatatgcccatcaaccaatgagtggataaagaaaatgtggtgtacatatatgccatggaatactactcagccacaaaaagaaatgaaataatggcattagcagcaacctggacagagttggagactattattataagtgaaataactcaggaatggaaacccaaatatcatatgttctcacttataagtgggagctaagctatgaggacacaaaagtgtaagagtgatataatgaactgtggggaattggggggaaggggctgagggattaaaaactacacattggatgcagtgtacactgcttggatgatgggtgcaccaaaatctcagaaatcaccattaaggaacttatctgtgtatccgaacaccagctgttccccccaaaactatcaatataataataagaagaaaaactaaaaatatttgaccaagttcaacattcattcttgattaaaaaaaaaacttttaacaatttaggtaaagaataaaacgtcatcaaaataacaaaagtcaattatgaaaaacccacagttaacatcacaatcaatgttgagaaactgtaaactttttctctaagaactactacaaggcagggtgcccattcttgaaactttcattcaacacagtaccagaagtactatcatgagcagttagacaagagaaagaattaaaagatatacaaattgggtaggaagaaataaaattatctctatttgcagatgacatgatactatatgtagaaaaacacaaagactctgccaaaaaactgttaggcctaataaatgaattcagtaatgttgcaagttataaaattaacaaacaaaaatttatggcttttcaagctacagtgatcaaaacagcatgctacttgcataaaagcagacacatagaccaatggaacaaaatagagtaacccagaaacaaatccacacacctacagtgaactcattttcaacaaaggtgacaaggacatacattggggaaaagacaatctcttcaataaatagtgctggcaaaattagatatccatatgcagaaaaagggatctagacccttatctcttaccgtatacaaaaatcaaatcaaaatgcattaaatacttaaatctaagacctcaaaccaagaagctcccacaagaaaacattggggaaaatctctaggacattggtctgggcaaaaaatagttgaataataccccacaagcacagacaaccaaaccaaaaatggataaatgtggtcataacaagttaaaaagactctgcacagcaaaagaaacaatcaacaaagtgaagaagcaaaccacagaatggaacaaaatatttgcaaagtacccatctgacaagagattaataactagaatatttatggagctaaaacaactatataggaaaaaaaacctactaatccaatcaaaaatgggcagaagatttgaatagacatttctcaaaagaagacgtacaaatggcatatgacctaaaaccataaaactccaaaaagaaaataaaggggaaaatattgagattggccttggcaatgatttcttgagtatcacaacttaagctcaggctacaaaagaaaaaataaataaatgagaccacatcaaactaaaaagcttcttcacagcaaagaaaacaattaccaaaataaaaaggcaacctacagactgggaaaaatattcacaaaccatgtatcaggtaagaggttaatatccaagctatataaggaagtcatacaactcaataagaagaaaatatattacctgatttaaaaatgggcaaatggctgggctctgtgctgggtgcctgtaatcccagctactggggaggttgaagcaggagaatggcttacccccgaacccaggaggtggaggttgcagtgagccaaggtcgtgcaactgcatttcagcctgggcgacagagtgagactttgtctctaaataaataaataaataaaacctggcaatggacttgaatagacttttctccaaagatgacattaaaatggccaacaggtacgtgaaaaggtgctcaacaccactaaccatcaataaaatgcatatcaaaatcactaagagataccaccttacacctgtgaggatagttattctcaaagacacaagcgataacaagtgttggcaaaaatctggagaaaatgggacccttgtacactgttggtagaaagatacattggtgcagtcactataaaaaaaacagtatggagtttcctaaagttcatctcctctgttgacgcattgtgtccagcttctcacctgaagtccaacacagtgggcctccaccttggttgcatattggaattaccagaggcttaaaaattactgatgtctgagtttcatctctggatatcctaacagactttgtctggtaatcagaagaaaagaaaacagttgattctaatgtatacacaagatggacaaccactaatctagagagattcagagtgggggactttgatgaagtctgccaacaaaaggggctaagataaggggtgcattttaaggtgctgaaataaagtggctggcgagattggagaggacattgaatcagctgagcttggtgatgatgggggtcagggcagggagtccagcgtagcttccagggtcctggcttagacagcaggaaggatgaggcagggaagactggagataggaaaagtacttgcaaggggagacatattacacttgagatgcctgttagagttccatataaagatggtgagtatggagttggacacagtagtctggagcctggggaaagagccactgcgcaggtaaatttgcatatcatttaaaggctgagggattggtgaaaccaccctagggaggaagtatagaaaagaagaaagctcagaaacaaaccttttgagtactccaatactggcttgggaaactaaaacacaaagtgatttttaaaagcagccaatatctattagacaatttgggccaagcactgttctaaaggttttacttgctttaacgcatttaatcctctcaacaggtctatgagtcaggtcataactaactctaaaagttaattttagagagagaaagttctccactgagaactttcaagttcagtccctattcctttccctttgccccatatctgagcaagataggtgctttgtcccttggtaccagtagaaattgcaaaccattaaaagaccaaccccatgcgtaaaccttcaccccagctccacccttaaccacaataaaaacccaaagccacccaccactacttcactcctaattcactccagacagagcctaaggctttctctttggggaatacttttgctgtttactatgtgagtaataaaccgtatgcttttcctatggctgctgtaaattaccacaaaattagtgtcttaaaacaacaaaaaaaattattttctcacacttctagaaggcaggagtccaaaatcagtttcacttgtctgaaatcaaggtgttgacaggactatactccatgcagaggctctatgggaggacctgttctttgccacttcaagcctctgatggctgcttgtatcccttggcttgtgactgcatcactctaatcctcaaaaccagcatcttcaagtctctatctgctcgtctttatattggtgtctcttccgtgtgtttgtaaaatctttctgtgcctccttcttataaggatacaagtcattgcatttctgtatcactcagataatccaggataatctccctatctcaagatccttaatcgcagaaaaatccacaaagactctattttcaaatatgttgacgttttcagtttccagggattagaatctgatgtattctggggctctatttcagcctactgcagcatctattggtgcctatgtgtcatttgtgccaacatccataaacctttggggtgaacattacatagtgtccagcaggggatcctaaaccctcaaacaaaacaataatagtagcagttcgcaggtgattgaactgaaggaacactggaggttggggaattggagaaagatgtgtttggttttgttttctttcaacaggactactccctcatttcctagaaaactcttgagtccttaacagcaaggccacaaggagtgaaaaggctatctggggtacaatacgctggcttggaagtgtcgaggggaacaaaataaagagatgtctagactcaaaggagcacaccagttcataattatagaattagctgattgcactgtgaccggagaaaatactctgaatgcattcagggaactagcaacggtctacaaagctggagtggattttcaggtctatttgtacggaattaaagctacagttgttctatatcatcttacttttaagaagcagcagatattcaatttacatcagtagttaccttgacagtagttacttttgagttctgtttttcctgattattaggcttcctctggcattttgttctttataattctttatcagcacctcctgcagtttcctgtgacagtttatctagtgcatatgattagttgtatccttcaacagttttcaatgagtttagattaagttcactttccccacgaagtcagaatactgggtccacactgccactaacttactatgtgacatagaataatcccttcttctattcaggtttcaagttttgcatctgaacggcaagggaagtgtacggccctgtttgaaagtgtactgtccttcatggctgctgaagcatcctggggtgacccagagagagataattataaacaagcgtcatgatgcaaacggaaacttaagcatgcctcttaaaccacagtactgctgaccaacataggaggctggtgccctgcaaggtctcaaggtgatcctaaattctactacatggcattaggcatagaaaggcaatcattcttggaaggactgtaacagatctcattctcggcaattactgtaggtgggaatgagaaaattcttttatgttgaacaaaagcctttaggtcttttccaagcagtggaaaactgcctagatggacacaccaaaccaccctgatggaagaatttagaatgtctaatttaaaaaacaggcacatggcaatgcaatgaaggcctctgcctcttttccatttcttttcctctaccctgcttgctccactgtgtttaaacaatgttctctggaaatttgaaagcttcactgtaatcatttttattaggtttaagcaagtattaaattaattagcaaaatacagcagtcaaataaccagcttaatgtgctcatggggtatacagcctttaaagagtctctttattccacttgaattaagccacctccctctagcataggacagtaaggagagcatgggttttgagcctgataatgctgggctggaatctcagctctattgctttctatgtgaccttgggcaagttgcttaacctttctgggcctccattttctcatttataaaatcagctactcactatgttaagtggtttacatgaattgtatcatttaatctcacagtaacttctgagttgagtgtcatctgctttttgcaacaattaagtgagatcactcaggtgagcatatactcaggtgagatactcagctgagtacatagtaggtattcaagaaaattgtagccagttgttactatatgctcagctttatgctgtggaaaaaaaccatgaagtatttactcatcaagtataaattgaacacatcatatgtgcttatttaaaaagcagagaagcaatgtccaaaggaagaccatgactcagtttctgaatcttgactggttctctttttggaagggtttgaatgaggttgggttaaacacccctgctggacagatgagccccaagagtcacagggctaaatataaaccaaatgaaaggcagacaagacttgagacattcaagtagtctctgcaagagaagacaggggcttgcattcctctcccacaaaatctttacagcatgatctcccctcaagttggcctcgattcattgaccacatccctcccctctcactgtctgtctcaaatgctccttgcagagcttgccaacctcctactctttgatcttcctggccttcttcaggttattccccagttctaacagaagacatacatttacattgaaattcaactcatcctacaagtttgaatggcaccctcctgaggatggtatcaagattgaaggttgaggctttatatggcatatggtgaaaataattgctctttaatataatgagaactgattggagtagtttgatccctattaaaagcatcacaaatgtatggttaattttctaaataaaagcaagagtgatacgtatgtagtatgcataaaccaattataaacacaaagcaattaataaaatgttagcactccccatcagatgtcagcttattgccagataccaataatgtgtaaccttaggtatctatataatatacatactgtgctgcatagattaacatacaaatactttttaattacatgattacatgtgacttatagatttatatatgaagaaaacacagttaaccaatgaaaaaactataaagatggctgaggcactaaatagcctaaataataaaggaatgtcagaggctaaaatatggtaccaatagcatcagtaatttaaaatgagaaatgcaggactgcaggcaagatggccgaataggaacagctccggtctacagctcccagcgtgagcgatgcagaagagggtgatttctgcatttccatctgaggtactgggttcatctcactagggagtgccagacagtgggtgcaggtcagtgggtgcgtgcaccgtgtgtgagccgaagcagggtgaggcattgcctcacttgggaagcacaaggggtcagggagttccctttccgagtcaaagaaaggggtgacggacgcacctggaaaatcgggtcactcccacttgaatactgcgcttttccgaccggcttaaaatatggcgcaccacgagattatatcccgcacctggctcggagggtcctacgcccacggagtctcgctgattgctagcacagcagtctgagatcaaactgtaaggcggcagcgaggctgggggaggggcgcccgccgttgcccaggcttgattaggtaaacaaagcagcccagaagcttgaactgggtggagcccaccacagctcaaggaggcctgcctgcctctgtaggctccacctctgggggcagggcacaaacaaaaagacagcagtaacctctgcagacttaaatgtccctgtctgacagctttgaagagagcagtggttctcccagctcgcagctggagatctgagaacgggcagactgcctcctcaagtgggtccctgacccctgacccccgagcagcctaactgggaggcaccccccagcaggggcacattgacacctcacacggcagggtattccaacagacctacagctgagggtcctgtctgttagaaggaaaactaacaaacagaaaggacatccacaccaaaaacccatctgtacatcaccatcatcaaagaccaaaagtagataaaaccacaaagatggggaaaaaacagaacagaaaaactggaaactctaaaaagcagagtgcctctcctcctccaaaggaacgcagttcctcaccagcaacggaagaaagctggatggagaatgactttgacgagctgagagaagaaggcttcagatgatcaaattactccgagctatgggaggacattcaaaccaaaggcaaagaagttgaaaactttgaaaaaaatttagaagaatgtataactagaataaccactacagagaagtgcttaaaggagctgatggagctgaaaaccaacgctcgagaactatgtgaagaatgcagaagcctcaggagccgatgcgatcaactggaagaaagggtatcagcgatggaagatgaaatgaatgaaatgaagcgagaagggaagtttagagaaaaaagaataaaaagaaacgagcaaagcctccaagaaatatgggactatgtgaaaagaccaaatctacgtctgattggtgtacctgaaagtgatggggagaatggaaacaagttggaaaacactctgcaggatattatccaggagaacttccccaatccaccaaggcaggccaatgttcagattcaggaaatacagagaacgccacaaagatactcctcgagaagagcaactccatgacacataattgtcagattcaccaaagttgaaacaaaggaaaaaatgttaagggcagccagagaaaaagatcgggttaccctcaaagggaagctcatcagactaacagcggatctctcggcagaaaccctacaagccagaagagagtgggggccaatattcaacattcttaaagaaaagaattttcaacccagaatttcatatccagccaaactaagcttcataagcgaaggagaaataaaatactttacagacaagcaaatgctgagagattttgtcaccactaggcctgccctaaaagagctcctgaaggaagagctaaacatggaaagggacaaccagaaccagctgctgcaaaatcatgccaaaatgtaaagaccatcaagactaggaagaaactgcatcaacttacgagcaaaataaccagctaacatcataatgacaggattaaattcacacatacaatattaactttaaatgtaaacggactaaatgctccaattaagagacacagactggcaaattggatagagtcaagacccatcagtgtgctgtattcaggaaacccatctcacgtgcagagacacacataggctcaaaataaaaggatgcaggaagatctaccaagcaaatggaaaataaaaaaaggcaggggttgcaatcctagtctctgataaaacagactttaaaccaacaaagatcaaaagagacaaagaaggccattacataatggtaaagggatcaattcaacaagaagagataactatcctaaatatatatgcacccaatacaggagcaccaagattcataaagcaagtcctgagtgacctacaaagagacttagactcctacacattaataatgggagactttaacaccccactgtcaacgttagacagatcaacgagaaagaaagtcaacaaggatacccaggaattgaactcagctctgcaccaagtagacctaatagacatctacagaactctccaccccaaatcaacagaatatacatttttttcagcaccacaccacacctattccaaaattgaccacatagttggaagtaaagctctcctcagcaaatgtaaaaggacaggaattataacaaactatctctcagaccacagtgcaatcaaactagaactcaggattaagaatctcactcaaaaccgctcaactacatggaaactgaacaacctgctcctgaatgactactgggtacataacgaaatgaaggcagaaataaagatgttctttgaaaccaacgagaacaaagacacaacataccagaatctctgggacgcattcaaagcagtgtgtagagggaaatttatagcactaaatgcccacaagagaaagcaggaaagatccaaaattgacaccctaacatcacaattaaaagaactagaaaagcaagagcaaacacattcaaaagctagcagaaggcaagaaataactaaaatcagagcagaactgaaggaaatagagacacaaaaaacccttcaaaaaattaatgaatccaggagctggttttttgaaaggatcaacaaaattgatacaccgctagcaagactaataaggaaaaaaggagaatcaaatagacgcaataaaaatgataaaggggatatcaccaccgatcccacagaaatacagactaccatcagagaatactacaaacacctctacgcaaataaactagaaatctagaagaaatggatacattcctcgacacatacactctccccaagactaacccaggaagagttgaatctctgaatagaccaataacggatctgaaattgtggcaataatcaatagcttaccaaccaaaaagagtccaggaccagatggattcacagccgaattctaccagaggtacaaggaggaactggtaccattccttctgaaactattccaatcaatagaaaaagagggaatcctccctaactctttttacgaggtcagcatcattctgataccaaagccaggcagagacacaccaaaaaaagagaattttagaccaatatccttgatgaacattgatgcaaaaatcctcaataaaatactggcaaaccgaatccagcagcacatcaaaaagcttatccaccatgatcaagtgggcttcatccctgggatgcaaggctggttcaatatacgcaaatcaataaatgtaatccagcatataaacagaaccaaagacaaaaaccacatgattatctcaatagatgcagaaaaggcctttgacaaaattcaacaactcttcatgctaaaaactctcaataaattaggtattgatgggacgtatttcaaaataataagagctatctatgacaaacccacagccaatatcatactgaatgggcaaaaactggaagcattccctttgaaaactggcacaagacagggatgccctctctcaccactcctattcaacatagtgttggaagttctggccagggcaattaggcaggagaaggaaataaaaggtattcaattaggaaaagaggaagtcgaattgtccctgtttgcagacgacatgattgtatatctagaaaaccccattgtctgagcccaaaatctccttaagctgataagcaacttcagcaaagtttcaggatataaaatcaatgtacaaaaatcacaagcattcttatacaccaacaacagacaaacagagagccaaatcatgagtgaattcccattcacaattgcttcaaaaagagtaaaatacctaggaatccaacttacaagggatgtgaaggacctcttcaaggagaactacaaaccactgctcaaggaaataaaagaggatacaaacaaatggaagaacattccatgctcatgggtaggaagaatcaatatcatgaaaatggccatactgcccaaggtatttacacattcaatgccatccccatcaagctaccaatgactttcttcacagaattggaaaaaactactttaaagttcatatggaaccaaaaaagagcccgcattgccaagtcatcctaagccaaaaggacaaagctggaggcatcacgctacctaacttcaaactatactacaaggctacagtaaccaaaacagcatggtactggtaccaaaacagagatatagatcaatggaacagaacagagccctcagaaataacgctgcatatctacaactatctgatctttgacaaacctgagaaaaacaagcaatggggaaaggattccctatttaataaatgggaaaactggctagccatatgtagaaagctgaaactggatcccttccttacaccttatacaaaaatcaattcaagatggattaaagacttaaacgtttgacctaaaaccataaaaaccctagaagaaaacctaggcattaccattcaggacacaggcatggggaaggacttcatgtctaaaacaccaaaagcaatgacaacaaaagacaaaattgacaaatgggatctaattaaactaaagagcttctgcacagcaaaagaaactaccatgagagtgaacgggcaacctacaaaatgggagaaaattttcgcaacctactcatctgacaaagggctaatatccagaatctacaatgaactcaaacaaatttacaagaaaaaaacatacaaccccatcaaaaagtgggcgaaggacatgaacagacacttctcaaaagaagacatttatgcagccaaaaaacacatgaaaaaatgctcaccatcactggccatcagagaaatgcaaatcaaaaccacaatgagataccatctcacaccagttagaatggcaatcattaaaaagtcaggaaacaacaggtgctggagaggatgtggagaaataggaacacttttacactgttgctgggactgtaaactagttcaaccattgtggaagtcagtgtggcgattcctcagggatctagaactggaaataccatttgacccagccatcccattactgggtatatacccaaaggactataaatcattctgctataaagacacatgcacacgtatgtttattgtggcactattcacaatagcaaagacttggaaccaacccaaatgtccaacaatgatagactggattaagaaaatgtggcacatatacaccatggaatactatgcagccataaaaaatgatgagttcatgtcctttgtagggacatggatgaaattggaaatcatcattctcagtaaactatcgcaagaacaaaaaaccaaacaccgcatattctcactcataggtgggaattgaacaatgagaacacttggacacaggaaggggaatatcacactctggggactgttgtggggtggggagaggggggagggatagcattgggagatatacctaatgctagatgaggagttagtgggtgcagtgcaccagcatggcacatgtatacatatgtaactaacctgcacaatgtgcacatgtaccctaaaacttaaagtataataaaaaaaaaagattatagaactaaaagcagaaaaaaaataatttaaaaaaataaaataaaatgagaaaagcagtgcataagacctgacactcaggtttcagattaccatgactaaaaagaaacaggttccaaattacaaaaataaaataaaataaataataatctgcttaattttcctgagccactgtactgggttgaagagtgtctacccaaaattcatttctacctggaagctcaaactgtgatcttatttggaaatagagtctttgcaaatgtaactagttgaggatcatatggtgaaatcattttggatttagggtgggccctaaacccgatgacttccttataagaagaatagaggacacagagacacacagggaaaaaagccatgtgaagatggaagcagaaattggagtgatgcatctataagtcaaggaacaagtcaagaatcttaagaccaccagaatctaggaaagaggcatggaacagattttccctctgagcccccagaaggaaccaaccctgctgacaccgttatttcagactcctggctttctgaattatgagagaatacgtttctattgttttaggctacccaatttgtgataatttgttacagcagccccaggaaactagtacaaccaccttaactttgatatcaaaacctgacaaagtaccaaaaatagaactgaaaaccaatataatttgaaaatatggatgcatagcagcataaattctaaataaaatactagcaatgcaattactgaagaataaaaagtattaaaagactagttcaccatgactaggtgggttttatgttaggcatgcataggtgttcgattgttaggaaatctatgaatagcactcatcacatcagtatcaaagggataaagtcatcttgatatatgtcaggaggacatttgttaaaatccacaagttcgtaagaaatattcttaataaaatgtgttataaaaacatttccttagcaagacatataatatgcatctgaatgtgtatatgtttctgtgtatatacacatatactttgcagctctgctcactaagaagaccccagaagcaatggccctggtagcaactaacacacctagttcccagattttgatttcaaaataccattctccttggagaagtggactggatcagggaatggacaagatgagcctgaagcatctcatagtaccagaaagtaaagaaatgctcaaagaatgaagggatggggacatgccaaaaggactcaagagctaacctgaaaaggcacccaatggttacagttaaaacaatttgtgcgacaaaacaaataacatagtattgaattataacccaaagtatgaaatatacatgagtccatacaaaacgtaattgaaataaataaatgagggagaaaggaaagctctttcatttaataaatatagaaggagtaacggaaacagaaaagcaccatttgcaaacaccacagtgatacttgtttcaagaaaaaccatcaatggatgctaaaattagtggataaaagcgtgatgaaaaacaggatgtttacatattctcaaaatatctccccacaggatacttatacttacgaagggaaaatagtaccctgacagtggagaaagcaggcaaacaacaatcaaagttgtcatcaatattggaacatatcgacatcttatctctccagacaggatgccctatgaagcctcagacaaactcaagttgaacaacattctacaaaataaatcgctagttttcttcaaaagtctcagaatcactaaaaataaagactaaagaagtgtctcggattacaggagactaaggagacctgacaactagatgcaatgtgtggtgatggattggatcctggatccccctcaaaaaagatattagtgggataattgaagtctgtataatgtctgtagatttattaatagtacagatggtccttgacttaacaaaggttcaacttataatttattttactttacatatggtgtgaaagtgatgatatacattaaataaaaactggtatgaaagtgccaatatgcattaaatagaaagtgtacttggaacattgagttttggtcttttcctaggctagtgatatgtagtgcaatgctctgaggatgctgggcagcagccgtgagctgcagcttccagccagccacgtgatcacgaaggtaaacaacccatattctacagtgtattaaatgcattttgtacatatattttcaatgtatgatgggtttatcaggaggtaaccccattgaaagttgaggagcatctgtattgcatcaatgataataagctggttttgataattttactatggttatataagatgttaatatttgagggaactggatgaagggcgtatgagaatgctatgcattcttttttgaatttttgtaaatctgaaattattttaaaatcaaaagttaaataaatatttaaaaatgaaaaataatgtaaaactaaattatagtgcaccttatacaatgcaattttatgcaaatattaaaattaggattttctcaaaatagtagagtgccaatgaggaaattctcacactatattaaattatcatactatatttaaattatattaaatcctacatatattacattatatatgtgcattgtgtgaattttatgttctatataatcccaaatttatagaatatatttataaacatgcatatagcaaatcaagaagaagaaattaggtaatattggaaattagaagacaaaatcatctttgcagatgctgtcgcactctacttaagacatgtaagagaatcaactataagaactactaagacaattcagtaggtggttacaaaataaatgtataggatttacagtactctatatgcccacaataacatgttagaaaatacaattttaaaaggagatcccatttagaaacaaaacctatagaacactagaaataatacttccattttatttatttatttattttattcattttatttattttagaaataatacttccattttagcaagagggatttgaaatccaagttagtaaggagcttgtatggagctggtacaattggttaaatatggggaaaaatgaagtgaataggtttattgcaatgcatgtcattataaataatctatgaattaaatagttaaatgtgaaatatttcaatactggaggcaaataagctagaaataaaataggtgaatttttaatctcagaggaaggaataattctttgagcataaataagaagttacaaaggaaaagactatatcaaaaattttcaatttatttcaacaagaccataaataagaataaaacataaatgacaaatttgaaaaaaaatatggttgtaatatctgtgataagcaagaatcaataccttaatgtataaaaagaggtcttaaaaataagcggaaggaaagatcccaacagaccaaaaaatggtacataaaattttattttatttctctaaaactggcaaaaaggaagtatagtatgtgaagagagtttggtgatgatacagagagataaggccatttgcataatatgtcatggatgatgatataaattaatacaatttctctgaagtgcctacagtgttactgtagcactgtggcatagtttgaagttgggtagcatgatgcctccagctttgtccttttgtttaggattgtcttggctattcaggctcttttttggttccatatgaagtgaaatttggcaatataacaagagccttaaagaactgcattcactgtgatccaataatttccaattatcctaagcatatatcagaacagttcccagaaataaggataacacaccctactatttataagagcaaaatattgaagatagtataaatatccaaaagtaaggaaatggttaaataaactctgatctatttataagacagcatacagccatgaaaaattatgtcagaattagtaataaatgtacttaggaaatatagtaaaatacaatataatgtaaagtaataaaaatcatgctgtaaaatagtaataaagtatgactcaactttttaaaaatatatatttcaatatataaatacccctaacatttggcctactttgaatgtaacaagaaagtctattttgaatatactgggaacctgctaagaagaaaagaaatgtaaatataatttaaattgaaatgctgtgatattttaacaaaagaaaattcaattatatgacttggaatcatgttcgtgtgcatgtgtgcgtgtgtgtctgtgtgtgtatggttaattcatttattcaataaatatatgttttctgatttttaaattttaagttctggggtacatgtgcaagttatgtaggtttgttacataggcaaatgcacgccatggtggtttgctgcacagatcattccgtcacttaagtattaagcccagcatccactagctattcttcctgatgttctccctcctccccacccaccctccaacaggcatcagtgtgtatgcccctccatgtgtccatgtgttctcattgttcagctcccacttgtaagtgagaacatgcagtatttgattttctgttcctgcattagtttgctgaggataatggcatcatccatgtccctgcaaaaggacatgatcttgttcctttttatggcttcatagtattccatggtgcatatgtaccatatttttttatccaatctatcattgatgggcatttaagttgattccatgtctttgctattgtgaatagtgctgcaatgaatatacgtgtgcatgtatttttataatagaatgatatatagatttatattcctgtggctatatacccagtaaggggatttctggggcaaatggtatttctgcctctgggtctttgaggaatcaccacactatcttccacaatggttgaactaatttacactcccagcaacagtgtaaaagggttcctttttctccacaatctcaccagcatcagttgctttttgactttttaatcatagccattctgactggtgtaagatagtatctcattgaggttttgacttgcatttctctaatgattagagatgttgagcttttttcataggtttgttggccacatgtatgtcttcttttgagaagtgtctgttcatgtcctttgcccactttttaatgggtgtttttttcttgtaaatttaagttccttgtagaagctggatattagacctctgtcagatggacagattgcaaaaattttctcccattctgtatgtcatctgttcactctgatgatagtttcttctgaggtggagaaactctttaattagaacccatttgtcaatttttgctttcattgcaattgcttttggcatcttcatcatgaaatctttgcccatgtctatgtcctgactggtattgcctagattttcttctagagtttttatagttttgggttttacatttaagtatttaatacatcttgagttaatttttgtatatggtgtaaggaaggggtccagtttaaattttctgcatatggctagccagttctcccagcaccatttattaaataggaaatcatttcctcactgtttgtttttgtcagttttgttgaagatcagatggtagaaggtgtgtgatcttatttctgggttctctattctgttctgttggtctgtgtgcctgttcttgtaccagtaccaagatgttttggttactgtagctttctagtatagtttgaagtcatggcatgtgatgcctccagctttgttctttttgcttaagattgtcttggcaatttgggctcttttattggttccaaatgaatttttaaatagtttcttttaattctatgaagaatatcaatggtagtttaatggaaataacattgaatctataaactactttgggcagtaaaaccattatgtttttttctttctttctttctttcttttttgtttgtttgtttgtttgtttgtttgtttgagatggagttttgctcttgttgcccaggctggagtacaacggcatgatcccagctcactgcaacctctgcctcctgggttcaagcgattctcctgcctcagacttccaagtagctgggattacaggcatgcaccaccacgcccagctaattttgtatttttagtagagacagggtttctccatgttggtcaggctggtcttgaactcctgacctcaggtgatccgcccgcctcggcctcccaaagttctgggattacaggcatgagccaccgtgcctggcctcagtaggaccattttcacaatattgatttctcctgtccatgagcatggaatgtttttccatttgtttgtgtcctctctgatcagtggtttatagttctccttaaagaagtccttcacttcccttgttagctgtattcctaggtatttattctttttgtggcaattgtgaatgagagctcattcatgatttggctctctgcttgtctgttgtggtgtattggaatgctaccgattttttgcacattgattttgtatcctgatactttgctgaagtgcttatcagcttaagaagcttttgggctgagacaatggggttttctatatattggatcatgtcatctgcaaacaaagatagtttgaatttctctcttcctatttaaatacccttaatttctttcttttgcctgattgccctggctagaacttccaatgctacattgaataggagtggtgagagagggcatccttgtcttgtgccagttttcaaggagaacgggcttttgtccattcagtatgatattgtctgtgggtttgtcagagatggctcttattattttgaggcatgttccttcaatatctaatttattgagagtttttaacatgaagggatgttaaattttatcaaaggcctttcctgcatctattgagataatcatgtgtttttgtctttagtcctgttaatgtgatgagtcacatttattgatttgcttattttgaaccaaccttgcatcctgggaatgaagcctacttgatcatgatggataagctttttgatatgctggtggattcggtttgccaatattttgtcgagaattttgcagtgatgttcatcaagaatattggcctgaagttttccttttttgttgttatctgccaggttttggtatgaggatgatgctggtctcatagaacgagttagggaggagtctctccttttcagttgtttggaatagtttcagtagaaataataccagcttttctttgtacctctggtagcattcagctgtgaatctgtctggtcctgggctttttttggccagtaggttatgtatttctttctcaatttcagaacttgttattgatctattcacggattcaatttcttcctggttcagtcttgggagggtgtatgtatccaggaatttatccatttcttctagattttctagtttatgtgcatagaggtgtttatagcattctctgattattgtttatatttctgtggagtcagtagtgatatcccccttatcatttctgattgtgtttatttggagcttctatcttttcttctttattagtctagctatctagctagcagtctattttgttaacttttttaaaaaaacagctcctggatttactgattgttgaagggtttttcatgtccctatctccttcagttcaactctaatcttggttattccttatcttctgctagctttagggtttgtttgctcttggttctctagttcttttacttgtgatgttaggttgttaacttgagatctttcaagcttttgaatgtaggcctttagtgctataaatttccctcttgacactgctttagctgcattccagagattctgatatgtcatttcttttttctccttagtttcaaaaaacttcttaatttctgccttaatttaattatttacccaagagtcatttagaagcaggttgttcagtttccatgtagttgtgtggttcttagtgagttgcttattcttgagttctaatttgattatgttgtggtctgagaggctgtttgttatgacttcagttattttgcatttgctgaggagtgttttatttccaattatgtgatcaattttaaagtgccatatggtgatgagaaaaatgtatagtctgttgtttttgggtggagagttctatagatatctatcaggtctgcttgacccagagctgagttcaggccttaaatatctttgttaattttctatcttgatgacctgtctaatattgtcagtgtggtgttaaagtctctgattattattgtgtgggagtctaagtctctctgaaagtctctaagaacttgctttctaaatctgggtgctcctgtattgggtgcacatatatttaggatagttagctcttcctgttgaattgaaccctttctcagaggttttgttcattccttttcattcttttttctctattcttgtctgcctgtcttatgtcagaaagatagtcttcaagatctgagtctctttcctccacttggtttattctgctattaatacttgtgattgcattgtgaagttcttgtactgtgtttttaagctctaataggtcagttgtgttcctctctaaatgggctatttttggctgtcagctcctgtattgttttatcgtaattcttagcttctttgcattgtgttaccacatgttcatttagcctcagcaaagttcattattaccccccttttgaagcctacttctgtcatttcagccatctcagcctcaacccagtcctgagcccttgctggagaggtgttgcagtcatttagaggaaaaggggcattctggttttttgagttttcagtattttcatgttttttttctcatttttgtgggcttatctaacttcaatctttgaggttgctgacctttggatggggttttttgttttgttttgttttgttttcttgttttctatttgtttctttgtttgtttgaatagtcaggccactcttccatagggctgctgtagtttgctgggggtctgctccagatgctggttgccttaatttttcccgtgcctggaggtatcaccaatgaaggttatgaaacagcaaagacggcagcctgccccttcctctggaagcttcatgccaggggggatgaaggaggtggctggagaccctggttggcaggtctcagccattcaggagaaatgggatcaggcatctgcttaaagaagcagtctggctgctttttggtagagcagctctgttgtgttggagatcccttcagcccttgaattgggctttccaaggcccacaggttggagcagctgagaagctcaaatggtcaaggtagtggcctgctctgccctcagccactccgtcccagggagaacactagccgaggtagccggtggcccccactgggaggaccccccttctcgcccccccaccacccccgcaaggaggagtgggattgggatcccgcttaaagaagcagtctggccatgcctccaccaaacagctgcgtcgtggtggggaaccacctctgcccctgttggctcggactctccatagcctgaaggctggaacagctgagttgtacaaccagcccaggtggcagtcctccccttccccgggcagtccgttccatctatttaataaatatttatcagatgcctattgtgtggtaagcactctgataggctctagagatacatgttatctcagtctgtttgtgctgctataacagagcaccacagacagtaatttataaagaacaggaattttattttctcacaggccaggaagtccaagatcaaggtgccagcatctggcacaagaacacaaaattctcttcatggtatttacattccggtgcagcagatatattaaacatataaatacaaaaataaatactgtttaaaattacagacttaagtactttgaagaaatattacaggtttactactacagtacaaaatgggctactgatttgttgggagggtgagagtgataggcaggacatacagaaagtattaaaagttattttccaaaattgtaaaagtggttgttattttaatataatcattaatgattattagcaattcttcctttttatcatttttgctatattttccaaaattttagcaattaacatatgctatggtttaaatgtgtcccccaaaatttatgtgttagaaacttagccctcaatccaacagtgtcagaagataggacctaatggaagatatttaagtcatgagggctctgccctcaggaatagatcaatgccattattaaagagaaagtttggctccctttggcctctttgcccttccaccacgtgagtacacagtgttatggagcatacagcagggagaccctcaaaagatgccagtaccttgatcttggactttctagcctccagaactctgagaaaatacgtttctattctttataaattatgcagtctgtggtactctggcacaaacagattaatacaacatgtattacttttataatcttagaaataaacagtaaatgtaaaagaaaacataacaaaaataaactagatattttaaatattgctgaatagtttgccaaggccccaaaagtcatactgtctaacaagggcaagctgacctttgggtccttgagtacactcaccctagtggcctgatgaagtggccgccaacatgaaggaacacctaaacaatagctttgtccaaactactcttcaagttctcttgtaaagttgatgtcaggacataaataccttcatcatttatttacctcaaatgcaaaaatgaagtctattttgaatataatagggacctgttaaaaacaaaaattttaaaacataattgaaattgaaatactatgacatagaccaaaaggaaaattcagttatattatactatctgaaatcatctttggagtaacctccaattggatgaaaaagatactgggatgatttgtgtacaccggtgtcttcctatgtttatagaacatagattcaaaagagaaatgtgacagatgctagatagaaagaagtctggttcaaataaggtgtgattcttaaagatcagttaatgccaccagacaaaaatatattgtagcccaggcaatgcaaaagtatggtgtaggaccatttatcataatctcaaattgaaaaatccacagtgaaaaaaggaccagaaatcagaaggcttttaatcaactgatctagttgctgcagtaactaggggtaggcccaaatattgtggttttcctgctggacgcacatatagaattgaaatttcctagcccatttagaaaaattaactttaatcttccaatttggattgatcaagtccttgcttcagccagtgaaatgtgtgaggaagtgaggagtggccagtgtcactgtgatcatggaagcctgggtagggatggaggctccagcaatgagtcatcacaatgagcagagttcccgtgacctgagtcaggcatgctgcatggccagtaaatatgttttgttttttgttttttgtttttttcttttttggcaagccattgagatttaggggttatttgtaactacagcaaaacctaacccatactgttattaatgcaaaccaccagctgtccttgatcaaatttacttaaacctttatttctagtgataggaagtttagtagctggtatccagctagttacaaaagacagactgttccaagcttcacaggacagtgagaaagaatagctcataaagaatagcacaggctttgaagtcagaaaaaaattttaaaaagaaaagaaaactgtgttcaggtgctggctactactacctcagcacagggacatgtcattaacctctctgagcaccaattctttttcacctgtaaacagtataatattggcaagtatttatcagggtcattgtaaaaataaaataagtcaatgcatgtaaaacatttgacacattaggtggaagatagcgagtggtcaatatatgactatcaatatcattattattattattacttctcagtatgtatttataaccttactttttaaaataccataaagccaataacttgttaactttatggctctccacatggtagggatgcacattttttgcatacaaatatacatttcttgattcctctgtccctcctcaatggaagaaaatagtgttggtagaaacaaagtatcagcctcaatttgtacatatactcaagttcatgtaagtcattacaatgtgtttttgagagttgccacttcactgctctataaaaagcttcctggaaaaagtattaacagatggcctcttactctcggagactgttagtagcacaccagatggcaacccaaatgagaagattcaacttaaattctccaaactgaaggaaatgtgacactagcttttttaataggtgtgcagcattagaggtagcaaagaaattatcagttaaaatagaaactcattttcttgccttatttcaatgtggaatccagccttcattgtcttatcagtttgcagacagttcacgtgaaacactggaaatagttttcacaacataaacagaaattttatttgaaatgactgacagatttatgaggtgtaaggctagtctaaagaatgagaatgcaaggcagtgccccagggatgagtgctctatgctgcggacactcctttctctccaggatcagtcattagtttgcaacattttggaattattgttagaaatattaggtttcagctcaactgtcaaactttcgacagggaagtaataactgttttaagatacttgtcatccttccagaagtccaactcacccactgatgaataaaagcctggactgggtgtggttcccttcccaggcattggtacagtacaaattctaccagatgcctttgcattctgaaataatgttgtcccattagggtttaagagaggccaacagttttcgtgttagggtagagatgtgtccttctgccgtattagattatatgagtcaatgaggatgttttggccattagagaactcctaaatataaacattttaagaggattatgaaccaactttggggacaaagttgacattcaactattccattcaaacccccttggatcttcagacatttacaccaatgggggcacattgtaaagatagttttttggcaaagtggctggaaatatggtccaatgcatgaatacacaacattaaaatatgcatatatactctgaaccagtcttttgggaaatgtgaatcacagcctccctgactacacaaaactttaaccgagagttaaacctgggaatttttcagcctggaccactgctgtcttctcctgtccaagtcctagctcagggctggggtagacacaaacaaaacatgactgccacaaaccacatcaaatttacaggaactccttcaacttttcttgtgagttcctggaacaactagagtcaatgaaaagcacagattgggtccatctctgctctcatgaatcctccatacctgtggagctaagattgcagcatcttaaaattagaagaaacacacgtggctccagggcttaagggaacaggtattgtctaaagaaagaacgtatcaattgagcgggctaaccagcatggaaaactgaattcaaagaagcacaagttgtcatgtgtatatccagcactgtctaagggagagagatcctggatctggaggccactgagaagaggatctttactctaggacagggacagatcactgagttccctcattgatggagtaaaaagttcaccctcgggccactcacctctccaagtaatatttggctaaatgattctatttcccatatctctggatattgagaagtgaacacaaaagcattctggttattggaaagaaggaagccctgttataaattattttgccttattcatcactgtctggtatttcagttagcatgagtctatcctcatctctggcaccccaagacggtttaaaactaagaaccaggcctgagaactggagtttttaacctggaatccatggtcctttaggacaagtctttggaagctcagtggacgccccccttaaactatatgtataaatgtgtgtagatgagcatataagcatgtgggagtgtggggcaaaccataggttctctcagatttccaaattggtccaagactcaagaaagattaaacccacttctctagaatgtggtgacctaaccaagaaggttactcaagaaaggttaaacccacttctctagaatgtggtgacctaaccaagaaggttactcaagaaaggttaaacccacattctctagaatgtggtgatctaaccaagaagctgctcttaagaaacctttcttaccaccaaccataacccttagatggcacctatgtgcctaaatggcatcatcattgcatcccccaaattgcaacagtgcaatacctaaaccaagccagtcatgataattttgattatgtctaaacattgtcatgaaagattttaccactttcctcagttattcttcctcaaactcaaataattatccttttatgtgctaccaattcctcgccttacagatgagtttgtggtttttgtactgctaagtcttggtataattggctgatatttcaggaattagaagagaggtctggtggcaggctagttctgttcaacccaaaaatgtctgagttttatttgccatgtgatgtattagggctcaaaaagaggttacattaatctcataaaattaaataaaaacatgattgccaattaacagcgtaggacaatgtataaacatgcaaacagatatcctcttagacaaagaaagcatttcattagagccaaatacactgatgacaacatcacgtgcttaccacggtggtggatgcaagcaacatcccacagagacagccttcctcttggcttcagcattggctgccatccaaaattcacagactataaacaattaaaaaaaaaaaaactttccatagagaaaagttagggatagaactcacttggggtccccaactttctgaggaagtgctcatgtcataagtcaaagcgacattttcatcagcccaaggtggcaggcaggataaacgacctggccgtgaatgcacacgttgagagggaacagtgaaaagggccctcaggaaatacctgtcgaatgctgactcctaacccaacagggctgggctggagaggaaggccccattgaaggtgttaaaccacagtgggaagcttagctcctccaatcctgtctcactccaatgaaacacaacggcttcattgttgactttctgttgaaacaagtctctggttttaccagcagcctagttcagggaatgtgctggctggacttttatgttatatagaactaagaaggttgaggatgaccctaagtcaggtcctaggcactaaagcctaatgctggtctagtccaggggattacaattttctctgtgattactgctgcttcaggtgagcagatgtccacatattttacaccatatttttctgaggtgttgatattttctagcttttgaagatgtaaatttgtgatgtgtgaaatgaaaagtacagtaccagcttctttgaaaacctgaaaaaaaaatcatttcagaaattctttcctcttgaggtcactgggttgaatccacctcagtctggttgttaccaaaccgcattactaaggtttaacttctaaataccaaagtttcagggcatcgagagaagaggggagaaagtggtactgaggcactgaatggagacagaggggagatgggttgaccagaactctcagcagctaggccaattgggttctagattccaaagaaagaggtccattattgctgggatgcccagaattattgtcccaaatccactagaagcttgtgggaattaacactctttattctttttttaagctgtgaaatatctgcagcgtgttcttgggataaagaaggagaaagagtcacctcctcctccccagtgaatcacagtcatgccctgcgcaagagtgtattcagaggtctggtctctgggagcagagtggagagtggagagttagaggtaatgatgggaacccattcgtaatgatagagttagggattaaagaaggctatacataatacagatctccccatgaaaggaagtatttctggaaaatttcatgggcacttttggatcccaaattagaacttcttctgtggcagtgatggatggagaagatcaaaaccatgtgaatctgcagatactgggtattgggctatagactttttcccacacaccaacctccagtgcctccatcagttacaaatggctacgtgttattaaacagtcgctgaaaccacatattaaataaatacatatgcaaagaacaaagggctactgaatatgtaaagtggctggcacagtataaagagtcaacacatggttgattgatattgctattattgaataatcgattgaaactgtgaacaagttctaacactgcactgagctccctgagagcagaaacctcttggtatctcctacagtacagagcacagttcctgaaagatcgcattaatatagtcagtgttcagtgaatgtatttcagtgaatacatggattgaaaagaaagaataaataaatgaataaaagaaaaaacactgcatcagcataacatgaaaagaacattcatcccccttattgaatcaatgctgttgattttacctcctgaaattttaaaagacattcttctacttttctttaacatcactgccaccatcctatcatcaagtcaagcctggcctcttcaaaaatttcttaactggtctctcttccacctatctcaattctccttccaatttatgctccactctgaagctaaagagatatatttaaaatttatctgatcatcctgtcaccctcattctaaaaacaccacaataagttcattgcacttgtgacaaatacaaaactctttatcatggtgtgacagaataaagatggatgcaaattctttgcaacctcacccccacccaacctcattgagaggtggaatctactttccctccccttttatctggcctggacttattgacttgctgaattaatagaatgtggcagaagtgatgttctgggacttctgaagctatatcaccatctgcccagctttcttagagagctcactctggagaaagccagctgtcatataaaaaggccaaatgtcctgagatggccataccgcagggtaaaatgcagtgtggagacagaggtcaaagaatcctgaaatttcagatatgtaagcaaagaagccaactgaaaagtggattctccagccctatcccccacaagatgatgccatgtggatcacaggcaaaccaaccagccacccttccgagatttctgactcataaaattatgagcaaaataaaatggctgctttaagccactaagtttgggggtagtttgttatgcagtgatagataactagaacgaatgtcttaaaagatcacacatgacccagcccctgttctttatccccagacttgttgcatgccattattccctcactccacatccacccgtactggttatctgtgatatcttctgtctcaaggctttgcacacacaatgtctcactgccacataaccaccgttgtcctccaccatttgtctgactttttcttccaggtcttaatattatttcagggaagccctccctaaaccccaagactatgtcagatctcactgttctactcccataatagcacttgccacactatcttgtcatcatttataggtctgccttcctctctcagatgaaagttcttcaagaacaaaaattgtcttcttcattaacccagcattgagcatactgcttaatacacatagctgctcaacaaatgttgattagttagctgatttgaggaatgaattaatgtataggtgcatgatgtaattcctggagaaacagaggaacaaatgtcagaaaatgccaggatctaatctgagctcagtgatccctttctggtggacctggaggaaattatcagcctccccatgtgcacagcactttaatgtttgtaagtcactattccatccatcatttcatttcctttaagttagcctctttggcctgtttatctctcaaatggaaataatacttacaaattatctgtcatatgggaggaatattatagaattggtatgaaaatgaagtaagattatgaaaatgaacatgattttctttaaaaatacaatattttctaatggatgtggaatatctccacaaatatatcccataggcacctcaaactcaatgtatccaaaacatcatcttcccactaaacctcctccttctttttcctctgtctcagagattggccccaccacgtacctagtcacctgaaccaaaaagatgagcataatcttagaatcttctccctattcttcaggatggaaaaaattgataaactccatccataattgaaaaactccagcagatagctctccataatgggatctgtacaaaggcatatcatctaaggctgaagtctttgttgtatttgaatcctaagtaaaatggactttgaacattcacctatcctaaaagttctctagaccaggcagaatttgtagtgtctccatgagcaaagtctggctagcaagggttttttttgtttgttggttggtttgcttgtttttgtaaatatcaggccaacccctagaacactaggactacagagactttccaagatcagccagtgcaaccccttctccattttacatatggcaaatgagggccaaagaggtggaatgacttgttcaggatcattgcacaagtcagtggctgccaatccagtggctttcttcccattgcactaacatagaaacaatagcattaagttaccactttagtcatttaaaatggaagtctggctgaacaagagaaggcaaaggtgtatttagcagaaacaggataataaaacatattgaaggggaggaatggatcatctaggaatgttattattcctttgtccttaaaaagggaatcactggccatctcttctagagagtcagccacctgaaggcaggccctcactggatgatcaccgatatcccttctatctatgtgattttagtgaagacttggaatacctgagtcatcagtgccaagtctcccctctcacaagaagtaaaccgactaatgtttccaaatgtgtaatacaatttggggtctgtttttcaggttctgtttctgtggttgttctggaatctgatatctgtatgtgggttggaggtgggtctgaggggtgaacagttgttgacagggcagggaaccatcctcttcatctgtgcgatgctgatgtcatttacttaaataagggctaagaagtgtccattgtatgttgtgacaaggtcatttggagtggagcagagtgcagtgatgggagttgatggcaatggtccgaaggctgagtctcactatggggaagtagaagaccagcataccacatgacagactcattcagctcctgaggaataagacaacccaggcagttgctgctgaagaaggccacactgtacccagatgttgagaatccctgtggctaagacagaggagaatacagcattataatacattttggactttaatttctctggacatagaaattctaagcttttgactttcacttacaaggagaagatatttcagttttgaaccttaacttctttaggtcttaactctaaaaaataagaagatttaattgtgagctttaatttccctccatgaattagatcatgggggaggaggattacatccaaattcaggacatctcaatgttgccagcacttcattgttagagaatctttactttgccatttgacaccaataaagaatctctaaagagctctcctagataagatgaatgaacataatttgtaatggaaaataggcagttaattttcatccttgactatccagcagtcttgaagtgaagttaatttgcctattgttctgacccattctagagccttctgaaagcaaaaatctacattgctccccaagaatcctaggaggttactcaaaggaccaatggttggtattgggggagtgtgagctcaggactactgagagactactaatctgcccttcctgactgaggaggacagctgcacctcagatgacctcaacaataacacaaacttgttaagagagcaaaagccaggaaggattaacagggaataagaaggagtaagaaacggcgacaagtaactcagtctgtcaaggagatgaaactaagggttaaggaatcgtcaagaggtgagaaggggcagttattatcctagtttctcctgctttgcaatgtctgtaacagtctctctctccttccttcctccagacaccccatgcactggaatactctatgtaacagacttacttaaggcttggggatagtggaggggaattactgcacagaacagaaaagggaacaatgcagaattgaagattagacatctcaaagttccttggtttccctaccacaatgtttgtccttgggtatctttcttcttagactccaatctcctctcttgttgcttgtgtctgttctctctatagaaatcattttcctacctctcctcttgtacaaatttcagagccccatctcatccactctctatgacatttgtcagcaaactttttctgtaaagggcaaaacagtaaatattttatgttttgcacaccataagatctttgtcatcactgctgaactctgcttttatggagcaaaagcagccaaagataatgcataaatgaatcgacatggctgtgttccaataaagcctcatttacaaaagcaagtggtgggctacatttggcccttgggccatagtttaccatcccgtgctccagcagaaaattgaaaattgaaaattctcctcaagttcttcagttcctttattacacatggtgattgaactcttctttatctcaactcctctcattacgttcttccttctggggcctccctgtgtgtactaaaggggagtataaaaagctttcctagaccaaagatccttttattttttgttgaggcaccttcattccttagtgtgttggtcagcttttctgcagtaacaaacaaccccagaatctcagtggcttacaaaggaaacatttatttctcatatacagtataggtcactggtttgggtcaattctgctccatgtgtcttctcattccagaacccagcctgaatgatgcaatctccctttgggagatgatgttcttatttctggcagaaggaaagagaaagaatgctggcagaaattcacaatggctcttaaagcttctactgggatgtagtcggttatatccactcacattctttagctaaaggaatggacatggcaggttaaaactccatgggacaggagtttatggtccttccatatggggaggagtttactgcaggtaacatgacaatcatagatgatgtttcatccccttacaggtaattaagaagagagaataaataatacactctaccagaggtgtggtagagtgtattattctctcttcttaattacctgtaaggggatgaaatgcagaagttgtttcacttgttccatttataaaatagctttttttttaatataatgcggcactgaggaaaaactcttgtcgccctcattacacccagtgctttctgaagcctttatcagcagcacatttacaggtcctgtgagaggatgggacacttctgcagatggctcagttcctccaacatgcgttgattcttatgagctctacttacagaaagagatcttatctctgattgggagactctgatatactgatgaaatcagccaaacctcatttacgtatatcctatgattttggaacttgtgatataagatacagcctagcctggaatttacctttggagtctatgccattaaggctattcactaaatatttctggtactccttctgggaacctgatctccagaagttaagtatggataaccgcatgaccatgtcactctctgccagaaaattgaaaaggcagcacataattctccatgttccttgttcccaccatggtgattgtgaaagcaaattttgacaagagggcctctaccagcctgaattcctgaatgagtgtgaggaatgaagccccctgctgatctgctttggagaaatcatgtgaataagaagtagaactttgtcatgttacaccactaagatgtgtggggttgtttgttaccacagcataatgtaactgataccgactaatagactatgatgaaagagtttcccactgaaattagtagtgtaaacataatttcaggggtcagacaatctacttaagaaagtacttttcctcaagtgctttaaaagcacctatttacttatgaataattgccatattgataaaaaatcattcttttctcttcattaaggcacttaggttcctaaagatactttctcaatgtagtatgagtcatagtatgaatttagtttacagtattcagtaattcattatggatttcaagaaaggttttctgccatatctctttaattttttaatcaaatatttattgagcacctactaggtgttctacatgtctaggtactctgctagatgttggggaattattaataaacaagaaatatatggtcctttccttcagggagctgggaaacgttctgaaggaaaataaaagaacatggggctttgagagtgtataacatagaacctgacatagctagaggtgacagagaaagcttcctggaaaatatgacatcctcactaagattggaaagatgaatagaaattagcctcacatggcatttgtcagcaaaatcttgattaaatggaatattcatgaattagggtatttatgttaatttgaaattatagcttttgaaatagtcttttttatttaaatggttaatatctcatttataaaaactaaaattccagtattgtattttcatgtctatttttctcatcttaccattagaaatgaaataataaagtttgagaatgcatgtttttctctattttgtagacactttctgtgtcccacccatgtcccttagcccttgccatttccatatatattggcccaatttctgactgtcagtatgtgagtctctgcctagacactgtctctgaccactagtgtcagcttcacctgcccacatagcatccctgtaggatgaggaattgacctccacactgtaagcagctctggaacattgactgatggaaattagtatattaatggcccaattctttcctactgtgggcagggtgactctagggatgtattctactctggtactgtattcgtccattttcatgctgctgataaagacacaaccaagactggacaacttacaaaagaaagaggtttattggacttacagttccatgtggctggggaggtctcacaatcatggcagaaggtgaaggcatgtctcacatgatggcagacaagagaagaaaagagagcttgtgcagggaaacccccctttttaaaccatcagatctcatgagactcattcactatcatgagaacagtgcaggaaagaccctccccagtaattcaatcacctcccactgggttcctcccgtgacacgtgggaattacaattcaagatgagatttgtggtggggaactgtgggaattgcaattcaagatgagatttgggtggagaaacagccaaactgtatcaggtacccagaggtctccacaaggattcagctctagttgtccacagtagtaactcacttgacaacacaccctttattgtctactttcccttccctttatcacttcttcgccttctaccaatgtttcctgaggtcacctctgtaagggttgtttttatgtttcaacttggctaggcaaacaccagtatagatgcttttggtcaaacaccagtctagatgttgctgtgaaagtttattttgaatgcaattaacatttaaatcagtaggctttccttgaataaagcagattcccctccataatgtgggtgagcctcatccaatcagtcgaaggccttaagagaaaaagactgaggtcccccaagaaagtaggaattctgcctcctagctgcctttggacttgagctgcaacatcatttcttctctgggtttccagctgacctgcacttcagatttttgactttccagcccccaaggccttgcgtaagttaattccttaaaataaatctcactctctctctctctcacatatacacgcatatatatacatatacatatctacacacacacacatatatacacacatatacgtatgtgtgtgtatgtgtgtgtatatatatagttgtgtatataccatgtggtgtgtatgtttgtgtgtgcatctatatatgggtttacccttgaataacatgggtttcgagtgcacaggtccacttatataaggataaattgacaccaataaaatttacaccaagtgtgcctgcctccctttccacctcctccaccttttctacctcttttacccctgagacagcaaagtcaactcctcatcttcctcctccttctcagcctactcaacatgaagacaataaggatgaaaatctttatgacaatccacttccacttaatgaatagtaaattaattttatcatccatatgatttccttaataacattttcttttctctagcttactttgttgtaagaatacagtatataatatatatacaacctataaagtatgtgttaattgactgttaatgttaaccataaaccttccagtcaacagtaggctattggtaattaagttgttgaggagtcaaaagttatacatggatttctgactatatgcagggtcagcgcccctaactgcatcattgttcaaaggtcaactacatacacacatatgtgtatatacacatatgtgtgtgtgtgtgtgtgtgtgtgtatatatatatatatatatattttcctattggttctgtttctctggagaatcctgactaataaaacctcccaaataaactacttgtatctgaatccttgtcaggctctgctgctaggggagctgaactaagacatcatcttatagatgaagattcagattccacagcagagaacaggtaggtgacttgctgaggtcacaagactacttagatgtaaacctcagactagaaaccctatctcttgacctgcactgcttccacctataaagatcaggccaacacttgcctactgatcccccacccgggtccatgacagcctttgtggattggccttttcctctgggcccagttgcatcctctgaatacactctcagcagtcttttgcagtcaacagggcttggcatgcaagaagaaatctacttgccatccctcttctggactgtattccagtccagactgaattcaattatgctttccaagcctgctccaccttatcctaccccacacatacttacatgctgattgaagcctattccatttcctgatagaggtcccctccccagccccataaaaataaataaataaacccacacacatcaaagggactggagcttgaaattaagtatcactcctagagcccagatctgatcagctgaggatcttgccccaggctcctttgaagcctttcagcctagtgtgtgcacggccaagagtaggtggtactctgtgttgatggattaagaaaatgagcaaatgaatgaatgtacatctttaggtaaagtgaattattttgaagtctcttattccagtggcctttaggggaactggccaagaaaagaacaaaaaaatcacaatactggttattcctgagtcctcacacgtgagctccgagctcattctaatatttgccaaagtgcttacagatgctgcaacttctcttgttacagaatctaactaaagccattgatttaggaaagtggattggcaagataaacttggcaaagatggcaaaccctagcaggttagtagcagcaaaactagctggtgcagggacttctggcccagtcaggtttctttgcactgtctcctgggacaaagctgtctacaatggtctgggcagctcctagaaaaaagagccttggacagggtctgcatttagccttagcaaaagtgtacccctatccccatgaatgctgcagctcggcagcatacacagctgcagcccatcaaaagaaggatgaaaaccaaaggggcctgggctgcatgttgagtgggaaatgatgacagagacagtggagccttcaacagaggaaacattttaggaaacaagtcttggcctctgctccctcacccccacctttgacccatcatcctgtgagaagagtggctcagggccagctggggaagcaaggatgctgggaactaggaaatctgagtccggtttttcttctacatgagtacggacagtttgccaaggtcactcagatggggtcattaactgtgaatcaaaagtcgtctgggccagggatgaggggaccggattcctagtgtcaacatcaccactaacccctaagtgcctcacccaaggtcaagggctgtccaaatgcatgacaatattgctgtagtataaccgttctaataccttgagtttagtctgaacagttcacatagtctgatcatatcctaaaaacaactcagtgagatagatagtactatcatgcccttttacacatgaggaaactaattaaggctcagagaggttcatgcgcttacccaaagccacacggccagtcagggttggagtcagaattcacactccaaattcagggcacattctcatatgccaccgtttctctcacgagctttcaaataaacattaaaaagtgatgaaatacatatttttcacacatttgtcaggacctattctaagtgttgagaatacagtggtaagtaagatgccacaaggtccttgctctctggacttgacattctagcagggaagtgtacaatgacccattaacaagaacagaactcaagttcagaaaacggtggatgctatgaaggaaatgaagcaaggtaatcagagggagatgtggcaggtctaaagacttgatggccagggaatgaggcagatggtgctttccacaacccagcatctttggaggaaatcctgctcccctggccgctgaaggtgataacctgtggggtgatcccacatctgcataccttctgccaggaagtgttccccaggcctggtcctcatcatcctggaagtggctgtcaagctacaggctgccctggtaccacataagtctgggattctctgcccctgaggatgtcaggaaatatatatgtgtatgaggttggaggtggaagatccttcaaagcctagtgtctacaaaaagaaggaaagtaaatgcataagatgtatattgctgctcacaatgaacacagctcctatgtccagaacagctggcttcttacaggactgtagagtatgacagctgggaaggatggcccctagatgggaagacccaagcccagaaaggagacttatccagggtcacccacatggcagggtcaggatcagggtcactttcaggtggatcacacccttctccacggctcatgaacaaggaaaaagaggagaaggcacacttatggaacagatgccagacactgctcaggcatcgtatgttctcaatacccgctcactgagggctcaaaaacccactcaagaggagcacctactttccccaatccactgaacaaacagacccagagaagggaagtggcttgcacaatgttgtccagctctcaagtggcagaacaggatcaatctggggccacgagggctcttcccttgctgttgctcttgagatcccccggcatttttttctgggcttcctgaattgccaagcagacccccaaaagggagccagagattggaggctcttcagttgctcttgtttatccaccaagccataaaatacaaattccagggatgcaggtcaccaccgactcatggagagctccacccagagtggagagccttgtgaggagttgggggaggtgaacattaatatgttgggacctcgggaacttaaggagccccaggtccgaaatgcttgttgtgccacctatgatacaatgaaaatccccctctgctgccctccacttccttctctggctgcccagaatgaagtctactgctggcccagtagtctatgaagtctacctgcagacccaggttcactctgggacctggggtgatcacaccaggggcaaggcctacatcagcgcagtgtgtgtgtgctcgaccttccagaaccagggcatgatggcgcttggttgaactcaatagaactgaactctgcctttcagtgaagcttggactaatgctactcgaagctcgtgtgcctatgtaggtattagggtgaaggcaataaccaaaacgtgaaaaatggaacattacctccagttactgtatagatctcttcctctgagaccccttcccaacaggcaggtctaagagcctatttgttctctgtgagaacatgtgacacatattaccgcccacattggaatagaactctgtgctcagcttcagttctgaccacttcccagctctgagtgccctcagggcaccagggtacctccttgctacctcaccggagtcaccctttctgtgaagggaggccagattttacggataaaaacacaggactcccaattaaatttgaatttgagataaacaatgaataattatgtcgtataaatatgatccatgtactacgtgggacatacttatattaagcaattatttattgttcatctgaaattcatatttaactgggcatcctgcattttatccagcagctgcattcctgcggcccacgtggtggttggcacctgccgccaatactgcttgatagagaaaatagcataatattttgcaatagtatttggggatgaatactataggctgcaagggtaacatttgtgcatttgtgtcgtttttggaagacgtttccatcatgtataaagcctgtgcctcgtggattgcaaatgagacccagttccggggggggtgggaatgagaaagcagttagaaaagaaccccaggggatctgagacccgagcttcatctgccgagtattttattctcgttaattcataacagtgtctttaaaatcctggactagaatttgagaacagtcagtgtgtgcgacagtcattactccttggagactcccactccgccagccgggcgcccttcgtgcgttcttggtgccacagcggcctccagtggttctctgaggaaccacacgctgtctccaccgccaggctccagcttgtccctaaagccagggcggaaggcggcggcgccctgtggctgcccaggggcctgggctgtgtggccggatcagagctgtaaggcacaaatccaagtgcgcgccgccgtggaaacaaagcccttccctgttgctgtgaagctcagaccagacagggttctatttcatcttccacgccaacgtgtaacgtatctgctgacccaattttacagatgttctcttcaaaacggactcggctttgtgaatatttttctctatcaagctgtggtgatagaaatgtcaaaaagcaggttggggggggcttgaaatagaatgagacactgttctgctcagaattgattcttattctatcaattggttggactggaatgaatagtgggaaaggtaaaaccactggaattaggaccccctacccctgcccagtgcctcttaccgccaacctagcaacagcctcgcttcatttcctagaaagggcggcaccagcgatccattattgaaaacacgcgactcccataaccttgttcattttcatatgtgtagctcagggcaagaggttctctgctacggcttccctttgatttgaaagcaatacaaagaataaaggaaaatcaaaactgtggccatagcaaggctgacgcttgatccttccacacacatgtgtgccccccagttactacaaaggcaattttccaaacgggtggtcgccagccttcttcctttcacaaagtgattttctggcggtttcatagctttgaggtggctcctttgcacatcatttcagctgaaatctactccctggatcgggagacccaagaagagaaaccttgtggaaacagcagtccttgcagaagactggacttggaggtgggctgaaaatagacttggtggacttggatctgaggctgcttccacttggctagctgtgtctccttggtggagctgcttgcctcctctgggctttaagctcccacctcagaataaggagctgcagtggtgcatgcctgtagtcccagcgacttgggaggctgaggtaggagaatcgcttgagcccaggaaatcgaggctagcctgggcaacatagggagatcctgtctctaaaaaagcaaaaggaaaataaacaaataaggaggtggatgagtgtccttccaactcccagtctctgattcaagctacggtacctttggtctttctcaaactctttaaagacaattattttcattcattcatttagcaaacatgtaagtgcctaaatttgccaggccctaggttagaggcttagtctagaaaaatgaataagaaatgtccccttccttagaaataggtcattgcaaagcaacgtaagaagtactagagggaagataggaactcaggttctgtgcactctgctgatgggagtgtgaatttgtgctacctctctggaggaaatttggcactaacttccagattttcaaatgcagacacttcatcaatcaggagccctggttgttttactgactagttaatttaagcagaaaaaaaggtttttttcttttttgtctgtttgtttttgaaaggcttgagtagctcatagaatcccagagaaggccaaagtctcaaacctaaaaaacaggtaaggacaaaggtgaccaggcaagctgccataaccacacaaaaacagtttggtaaccatagtgacactaccagtgctggacactggtggttaacatcaccacagagccttcctctgggggaagatgaattcacactggttcctgctttaccaactcaaggaggaaagcatcttgctgagttgagtcaaagtcatatgcctgctctctagccacaaggaagtcatgggaaaatgagctcctggcactttgcacctctgcagtggcaagagggctctccctgcctgccactcaaaataattgagtgcagaatttcccaagtagagaaaggcacttaggatgctggtgtccaacatcatgtcaaatgtcctctacacatgcttttgacccaagaattctatttctacaattttatcctttagagatacattaatacacaagtgcacaaagatggctgcatggtgatgttctctgcatcatagtttgtaatagaaatgacactggaaacaacctaaagagtcagcaataggagcttagggaaatgacagaaaacaatgcggccattatgaacactgtattcattcattccacaaacatttgttgtgggtgttactgtgtactgggcactaggaggcaatgatgcaaaaatagacactctctacccccatggagctttctggggaaacagatacaaatgaaataattacacaaaccagtgaaaaagtacaaccaagctgaggactatgaagaagtagtatgtgtgtgatgcaagctgctatgcaacctagtcaaaggcatcagggaagaatgcccttggaaaggaagggttaagttggccatgaagatggagtaggagttaaaacaaggaggtgtggcaggtcagcagggggcaaaccatgaatggtctacacaaagggcaggttcaggtgttttctgcttgtccacgtagtaatgggaagccattgggagggagggagagcagggaggtacaagcggtaggcagagacacaatcaggtttgcattttgcaaagatcatattcagaactgtgtgaacttgtttgcagtgtagcaagagtaggagatcagttaggaagtggttccatgtccaagtgataggagatggcttcagaatggtacccggtggaggtagaaacctggatggatacactgatacacaaagtatcagtggatgcatgtatcagatggatacatggatacacaaagaggtaaaatccacaaggcctggtgatggatgtctctattccatagagtttctgggctatccagggcactctgtgagcaaacagagtcatgaaactcaaggctaggaaaagcagcatcctcagtattatcttttgtggaaacactcacatttattagacgtcatgggagaggaaggaaactcagaggtttctagttttgtcctccaggaaatggcctcacatgtttatatggaaattcttccaatttgtgtgtcacagaaatttggaattggggaagcccttagaaatcacacagtgtgaaaagcagactagaggtgccatgccaccacacacccaggttgtaaaacaggatgtagaaaaaccaataggagatagagtatgaaccatttttttatatatgtattattcaggggaaggactatgccaagtaaacagtggtgttagattattttctttgcttttgtatatttttctaatttttctgtgatgaatatgtaataatttttcaactgagaaaaaatgcaatattattttttaaaagaaatcacctatttaacatcttttctatgggtgaggaaactcagatgggagggtctctccactgaacaggaagaaagagaaatccaatctactactactacatgaaatggtttgttattaaatcatcttgatttgaaagctccttgcaatctttaaaaatgtattcaaggctatatgcaaagggccaatcacctgatatagtcagcatgctattttaataattgagcatgcattctccaatcatagaagtctcagagaaagaggggattttagtagtttttctttttgtagcaaatgtttgcctatgttagagtttctcagccttggaactattgccatttgggccagatagttctttattgttctgggggagggggtgctgtctgtgtgtgattcctatcatccctggcctctacacactagatgctagtagcagcctttccccagttgtgataaccaaatatgaccctagacactgacaaatgtcccaagaggagaactgctctctattgagaacctcttgcctacgtgatgcttacatagctcagatgacagctcaccacacttaggagcaggctccttcaatggtaagctgctatgttagaaagttcagcctctgttttttaatttttttttttttttttttttggcggagtctcactctgtcaccaggctggagtgcagtggcacgatctcagctcaccgcaccctccaccccccaggttcaagcaattctcctgcctcagccacccaagtagctgggactacaggtgcacgccaccaagcctggctaattttttttggtttttttttgtattttagtagagacagggtttcaccaagctgcccaggctggtctcgaactcctgagctcaggcaatccacccgccttggcctcccaaagtgctaggattacaggcatgagccaccacacccggccgaaagttcaacctctggatggccatctgtctccttgcagggtccagtgctggatcttcccttggggctctagatatcatgtgtttaatctctcttgcctctgatggttcttcagaaatttcaagatagtgccatgctctccccccaaccccctacttttacccacccgagtcttttctctccccatttgaacacttcttcaactgttcctcacatgatatgctgggtctcacccatcttagggctgtcctctgaacaggctccagtttgtccacatttccatgacagctccatgttcgcaactaaacacaattctccaggtgctggctgaccgtgacacgtaggcagagcagcttacctcctccttcctcctggatatccatttatgtagcctgagatgcctttcacttcctggcagccacatcacaccgcatccccattctgagctgttggccacaatgtaaaagggttgcatgtgcaatactgctcccttgggtcacccctcactagcaccttggttctggggccttcctgttaggtctccatttatccttttcaaacttcagcagtttccaagaactggtaggcatgcttgcctctgaggataatagggtagctgggaacagcatggaagaggaaatgactcttcattgtatacatgtttgtgcctttgtttgagacaaggtcccactctgtcactcaggccagagcgcagtgacatgatcagagctcactgcagtcttgaactcccaggcttaagtgatcctcctgcctgtgcctcccgagtagctgggactagaggtgccatgccaccacacccagctaatttctttaaaaatttgtgtaaagatgggtgtcttgttatgttgccctggctagtcttgagcttctggcctcaagcaatcctccctcatgtttgtgccttttaaacttcgcaccatacataataaacaagccagtaaatgaatacattgaagttacttcagctgctgagatttactcaatccttccagcctgcctttatctatttggaaatgtatgtcttccaatgtcctcaccaatataagaagcactgccttccgaatttttagtcgaaaccagtaggataggtagaaaaagataaactaaggctcatgaagacactaagccaagaccactaaacaggcaaatttccagttggaaccccaagaacccactaatttgcttcctttaccttgttgctattgcatatatggtttccctaagcctacctaattggtcagcccacttcctctttctttctggggagtctctgtactgtaactgcagggcaagctgagagacataccactgcccagaaaagtgtgtctatggtcaagtgcaactcaccatctaccctcaagaattcaactccctaacaaaacccacaccacagctgccttggccctcacatggggaggaacaggttggatactttaagggggcacacctgtaccacggtatcaagctctgttaaatggctccttttattttaaggcagcaccaagcggtcccaaaccagcagcaagaattgcacacacgataatggcaaatttaatgtgatttattcatataataactcatgctgcacttaacacaatacaaaagtatgtttttcaatagtgtagaagatgtgaattcataaaagctgtaagttaatgagtactgaataaaaatcacctgcaaaaggttctttcagaaacacacccaaaactacaataaattagggcaaggggtttgtaaatggcagcttcagtcctactccaaaccttctcacccatataaatcatagtccctgacttttatagaggaaaaaccaaaagcagttaacccctggcctttgctcctctccttgtccacgtcccaactcttgtttcctagcatgtgctgaatacactactagaccttgagcttttgttcctcattggcagtgggagccctcttgcctgggccgtcacattactcagagccaagtacctgagggttggctcccagccacctcatctggaaccaacttgtcggtttgttctctcccacccaaactcttcccccatcagaggataaggactatcacctagaatccagaatcaaacaagggcatcctttggtgattagcaccatacatgacagtgatgtcaggcagggcatggagtaatagccgggaaactctgatcccaaagaaaacccttgagtgtgggctccccacaacagactgtgttttatcagacactcagaggaaagtggcatctgtcccatcaggtgagttagtggacagggacaccaacgggagctttcagtaacatgtggaaaggcaagacccaagagcagtgagggctcttggccattatggccaaacgattggtgatgtgaaggcaacaactgacagtcctctctgcttgaagttctcatgtgcagaagagagaaactgtcctgaagtaccaggggaccactgagtgcagtggggctgatggcaggttccaccacaacgggctatgcctaaggccccaagggacaccctgggttctactttaatcccagatcccaggccagaattcaagagattcctctgaagagctataacctgcaggatggacttgggaaaggaaaaggggctgagcctctatttgggagtttatacccaaagcgcttcacacagtaaggtatggacagcttgggaacctgacaggcggcaaaagattgggcagagagggaagagtcagtttccctctgtagctagggtgaggctgctccagagtcacttggttacctcccagcacaaaccccaacatcttaagtgattaaagattaatgtaggttgggtgtatacccaaaacaattaagagcagggactcgaacagatatttgtacatccttgttgacagcaacattattgcaatggccaaaaggtagaaatgacccaagtggtcactggtggatgaatggataagcggaacgtggtacatacatttcagtccaaaaaaaaaaattaatgaagcagggctgtgcagccattacagctgttaatcaagaactgtcaatgacataaaaaaccaagctaacattgtgttagatcaaaaaaacaagatatagattatatgtggtagtctgcatgtatgtaaagctaaatatgtccatatctgcatatatgtctttaggcaggtaaaagaatgaaaggaaatatacaaatgtcagcagtgggtatgtctcaaatgctgggcttcttttcatctccagttttcacatgttccagattttatgcaatgagcatatattactctgataatggggtggagagacacagtaagcataaaaccaaaccccaaacaatgcaaaggaaaatgaatatttattcaatgtccagattggggaggggtctgtgtgtttaacaggaaaagatacagaaaaaaacctatcacacaggaaaagataaatatgtttgattattttaaaaggtgaaacccataaccaaaatttaaaggcaaattcacacaagtggaaatacagatgcccaactatcgtacaaagagaaccatgatcaaggtcactaacaagcaaagaattttaagttttttttgttttttgttgttttttatttgagacggagtctcgctctgtcacccaggctggagtgcagtggcacgatcttggctcactgcaacctccgcctcctgggttcaagcaattctctgcctcagcctcccaagtagctgggattacaggcgcccaccaccacgcccggctaatttttgtatttttagtagagacgggatttcaccatcttggccaggctggtcttgaactcctgacctcgtgatccacccgcctcagcctcccaaagtgctgggattacaggcgtgagcaccgcgcccggcaagaattcaaagttaaaacaggttaccactttcacctattaccatcaggttgcttatttttgttttatgttttttatttgtatgcatgtttactttatgtttcagtttactaccccctaaggcagcaagagagcaggaagataagcaaaatagagatgtttttgacaacttggcactgagagactatcctaagggaataatctgaaatacataaaaacattttattcacaaaattggtcatcacagcattatttacaatactgaaaatctggaaatagcctaaatttctaacaattgaaagaaggttaagtaaattataagactacacaataaaatatattaccagcaatatatctttgtgaaaatctataataaccacacataatacttagtaaaaaagaacataaattacatgataaagaatatgaccagaacaatgcaaaaaattcacacccccaaaaaagacaagatattatatggcaattttgtggtaaaatattcatgtatttgtgctgcatttctaatttttccgtaactgacacatcagttttataattaggaaaaaaatacctttttaaagtaaagcgaacacaagattctttagcaatgttcattccatcccacaatagagtctagagagtcacaaaaacctcagcctccttcgggagggggggagcttggtagtgaaaaatggtcatgaatgaatgggtgaagagagggatgggacaacctagtaggagggaggtagggataggcaagggaaaggtggggaccagtagtcatactggtcagccaaggaaaggggcattgtggagtcagggaagactctgactgctcaacagaggtctgtctagacccagtagtaggcactgacggtgttatcaaaggacaggatcaaagagagattttaggaagacacgtggattattttagggacaggggaggaaagaggaggggtgggtaaactacttggaaagaaagggagaaggactgagaagatggcaatgggagtggggaggaaggggctgattgcctttgtgacctcactaccaaacatactttgctcacctccagataagtctttgtggggcaaatgcaggataaagaaacagctcataagaggcacttgccaacatccaacaaattcagttcaaaaccacagaaaatctaggagtctccaaagaaaatcacagtcctgctgtgttgccgaggctggaatacaatggcacgatcttcattcactgaaacctccgtctcctggttcaagcgattcttgtgccttggcctcccaagaagctgggattacaggcatgcaccaccacacccggctaacttttgtatttttagtagagacggggtttcaccatgttggccaggctggtcttgaactcctaacctcaagtgatccgcctgcctgggcctcccaaagtgctgggattacaggtgtgagccaccgcatccgacttctaacgcactgggttttaacaagcccctcaagtagttctgatgctccctcatgtttgtgagccactgaatgagggccatgcaaaatgtctagaatcactagttctgctgtcagctaaaccacatgaaagaacccctgctcatgtgaaagagagatttctacaaataaagtgacgggaggaccactaataagttatgtccagcttagtggggttggggaaaggttatatgaagcaacaaagatacagtttctctaagccaagtaaaggtaaagaactgtggagcaggcaataaagccaaatgcactgaactatgtcataaggaatttacaggctgtattgtaaaagccacagtgaacatgatgacagcaacaacgaggatgaagaacagcaaagaaaaagctgagggaaaccatcgaccaaagcaagcggaggctcaaaagagagacgagcttcaggatcaggaaatgaacagggcccttcagtcacggagaagtcgttgttgccagaacagtcagtcacttaactgcttagaagatcaccgtgttaccatataacctctattgtaggctaattaatttttaaaatctgtctaaaatttactgattttaatataatatcttgtcatttttggcaacaatacactgaagtaacaatgtagtttgctgtattttgtttcacaaatatttacctggaaacactggagactttgtaaagagaaaattactaaaaattactccttcactacaggacagtagatatttaatatttatttagaaagctattgacacttctgatgactactgataactgagaagattcaacatgttataaatatgagttgtaaatattccatcccttttgagattatatacactaagctttttactaccactggcctttctggatactttcatatttagagaatatagaactacattctgggagattgacaatgacctaatattacactaatgaaaagtcttcacagtcctcaaaataatttagaatttaatgttttctttaataagcaattaaaatggaatattttctgcctcctgaataaatacatgtctgtaaccaaccatccctaaagaaggatactaatatattttgagtgattcaatccacccatggatatagtcacatctttaaatgttttccagtgtgaacaacagtcttttaatagatggccattgagttcaagggtcatattatttgctaacaaattattatttgggccagaaagtatctgaaaaaagtttaaccaaatttcctacacatctcatatctctagtttattaagcattatttattatttggtgtaaaaattctacattaattacttcatacatattttatcttgagattatgaaatcccatggtcttagaaacaaaagatagactttaagacactggcttctgctatttttttttaactttagatttgaaaaagaaacatggattacatgttaacataatattttgaatatatagggctcataagatatattattaaattataaacaaaataatcaggaacttagtgtggtgcctagtttgatatatgattactttttgaaatgcactaaattccacaaataatgaaagtattctttgtgtataatgttatgtttggttattatgtatggtcttcgtatccaaaggtatgacataacttgagtttgtttgctttgtatttattcagtaaataagccgtaactgttttaaaaagagggaaattaaaaaaaaaactggtccaattaccaattataaattttaataaagactaaacgaaaaggtttggctgttacatattctcaggccaaattgttgatgcatgtttggattaactagccctcaggctgcttccaatattatgggtaatcacaaaacgaccagctctaactcctcctctcaccagctggaagggagcacatcacatttgccatccatggttggcaaaactcaaggcatcaacaactggaaaagatctccaccttgggaatcattatacatattgtgatcctgcaatgggtcagaatccacaaaatacagttcccctgcatggatgtcagaaaagttagctagaaattcatcaggattgaagccaacccacacagtatacctatagtctatggtgcgtatggaatagcccatgatctttatatcttttaaactcggcttgtcagaattccactgagggatgtctgaaggccggggatactggctataggcaatcagttcacggggattaccagggaggtacggatcctcttccaagtcacggaatcgaaaatgcttcagaaggttcttgccttctctgcacagctcaacgtgaaatgaaggaacggggcagcgaggtggaacctgcagtcctgcaagtccagccagcgtgggaaaaagagacacaagttccacaaggtccatggattgcctgcctgaaacaggaagcgacagagcagaatgggttacattataaaagcctgccatggccaggcaggagcagtaaaggaacctgtctgggctccatatgttttctttttttaatttacaacatttatctttagcaacagacgtttagaaacaccacctcggcacctcaccctgcattaattactcatccaatcaaatagcaggatgcaaaattagggccccacgaggctgttggcgctttttaaaacaacctgaattttggaaccaccgatttaataactgactcagacaaggatcatcaattaaggctacaaccactaggtaaaagagtctgttgaggaacaggatattctgactcccacaggatcaccccacacattactcccttctggatgtctgcattagagttatctttgcattttattacgatcaaatacacacaccatgacatttaccatcgtaaccactttttagtatacagttcagtggaattaagtacacttatactgttgtgccatcattaccaccatctatctccagaactcctcttaatttacacaactgaaactctgtccccattaagtaacaactcccctttctccatcctcacccagcaactggaaaccaccattctactttctatgtctatgaactggactactctagatacctcataggagtgggattatacagtatttgtccttttgtgactgacttttttcacttagcataatgtcctcaaggctcatccatgatgtagcatgtgtcagtttccttcctttttaagactgaataatattccattgcatggacggaccacattttgtctgttcttctgtcaatagacatctgaattgcttccactttctggttactgtgaatagtgctgctatgaacagtaatgtacaacctttgattgaatacctgttttcagctctgtggatatatacctaggagtggaacttctgggccatagagtaattctatgtttaactctgaggatccaccaaattcttttccacagtggctgcaccattttacattcttaccagcaatgcacaagtgttccaatttttccatataatcactaacactcttaacacttgtttcattctttttttttagacggggtctagccctgtctccaggatggagttcagtggcgcaatctcggctcagctcactgcaacctccgtctcccaggttcaagtgattctcctgcctcagcctcctgagtagctgggattacaggcatgcaccgccacacccagctaatttttgtatttttagtagagatggggtttctccttgttggccaggatggtcttgatctcctgacctcgtgatccgcccaccttggcctcccaaagtgctgggattactggcgtgagccaccacgcccagcctttcacagcttttgttgttgttttttattaatagccatcctagtgggtatgaagtagtatttcattgtggttcatccatatttaaagtctaaatactgtactttatattgattcctgttaaaattgaaattggatttgcactaccattctggcccttctggatctttaagacagtgctttatcatgcttgatttcattttctagacacttaatttttaagtaaaataaaaagaaaacaagtaaagaaagttgaaaaaggtacctttacaatggcaagatctggctgatgctagctagctcttcaaccgagtgttcaaacttacaatactagtaacgctggccatgaagtgcccccaccatgtgacacaatgggagaatacaacagcccatgtagcacacgtgtcaaaaatgttaccctgaatgtagtcatgtggaagcaatcagataaatccaggctgtgggacactgttataggacaactggcctggatacttataaaaagatgaggtcagggagataatggggccagaacatgtaaggccactgtgacgacttttactcagatcaagaagggtacataagaggctcctgtgccgggctgtgacatgacttgacttgggttttaatggaatcactgtggctgctctgaggaggaaaacctccaagggatccagggcacaagcaaggggaccatttagcaagctcttgcagtacttcagcacaagacagtggcagtctggtccaagacagtggcaggcgaagtggtgggaagtggtacacagagtctgaatggagtgtgacaggctttctcatagactgaatattgcatatggagtaagagaagaacaggggttgagattattccatgattttttggcatgagtgactattctcatttcttgaggacaagaagagtgttgaaggaaaagctgaagatgaaagatgtgaagtccagctttggatatgttaggctggctaagtgggaaagactattggaaacaaaagtctgaagttcagggaaaagacacagctagagataaaatttggaaataaactgaaaggccgtgcagttacatcaatttctaaattgctgaacacttcccaacaaaagtttcagaaaagattctcaaccaatcagaagatctttcccagcaaacaaagggctaaaatcatgccttgaaactgtttaacctttctatcaatgacatgaaagaagacaggacatgcagtgcacaaaaatcaaagtgcaaaaaataaaattgggtagtataaagcaagctcagaaagatccagaaaggcctgaatgatggtccagaaccaagacaaatttaaacaggaatcaatatacagtacaagatttagatgttaaggatggattaaatgcttaagtccagaaagggggcaatctggtttagcatagttcatagaagaggcactccaaaaagagcaaacgtcatacgtcatttcagagacagtgtacaacctgtccctgaaatgcactgggcagatcaagtcaggatagaactcacaagaacccatacaggttgcccacacatccaggaggggtatctggtccaactggtattctggaagtgctttctcaaactgaaactttttggaagacagagaccaggacaaccacgcgtctaaacactaccttgtgacgaatggttgaagggctggggatttcagcctagagaagagaagatattggtggatggacagggtcgggggcatcagtgctgttttcaaagctttgaaggactggcacatggaagtcaaagtaaacttgcccttcactgctggggagggcagagtagaatcacctggtagattttacagatctagtggttcactagattgatgagctgtcaaaatggaaaatgtgccccccacaaagaaggctgagtccctaccaaaagtgcgcatcgagggaaaggattctcctcgtctgttacgggggcagccccttactctaagctctggagcaggctcttgtagactgtaccacagccctccccatcttggggatgcacctgttcctttgtccatcatcatcccacaaggctccttgtggacaggggccatacttgtcaattctggttctgtcactctttccccgcccagagtatgggagatgctcagaaagcgtgtgctgaccacaaaatgttgagaagaaattccaacacaaggcaggaagggggggtctgtgtaacccccaaagcctatgattcaataaagtggttcacatataaactaaaggtgatcttactgtcaagcaatatcatttcagcatattttatacctggctccatcaactgtgaggcggaatcaaaagggtcgaggtaagggaaaagcttctcgcctgcctccggaagtgaagccgtccttccaggaacatagaatatcaggggaacatgggtagcaacatcaaaattgctgtatttggcccattctccatgttcacctagagcccaccctagttcataaaaagcacagaatgacagaaaatgaataatcatcataccacagcttgtttattttagataccatttcatttcctgttgtaaaaaccagaggaagtagaaactcatcacctagaagaaaaatattcacttggaattaccacagaaagggttatttcaactgaatgctgctttattcaaaatcaggtatttgtcctcatgaggaaacctttaaaaaagaaaaaataattaaattcccaaactcaaatatcttaacaaactactagcaacatatacctaacgtaggactctgtggcggttcccacacatgcgttcctcccctgctaagacatgctcattcttgacaggctgggaaccctgaaagctgtagtgtcaccactgccctgtcctgtgcctacctgtcttttgactcatgccctacgaggtcaggttttcagtttggggtatgtgccacctaacagtgagctgtggaactgcaacacactcggcaaattcaaaaaagacaaggacatcttcgttgatttttaagacataccatagatagggtaaaccaaaacctctcatttcagatccttaacctcaattaaaaacaacccttcatgcctatttaaaacatcccttgcaaaagatggtttgaatattccaagttggaaatacccagtcttttaaagttacagcaccctttttgatacaaaaaatgtgcatgacagaaattgtacagtgagtagtgttataaaaataaccaaacacaccaaaagctgccacgggtaaatttgagaaagtgttgaaatgtaccgcacagcatgagaccttgctggctccgtctaatagatgacgctggggctgcaaatgatgtcccagccttccagggcctgtggtctccagaacagggctgaaacctgttctgagttgacagtgctttcccaaggagaccccaagttgagaggaccctcttacccactcatcaataatcaaagcagacttgatgcccatcagagatgcccaatgattctggtgagccgttcctccctctggctgtcagtactggggagtatggtggggactttcagatagctcagtggagctcagaaagagagggagttccccctgacacccgccccagtcagtaagccccggggcctgaggggcatccccactgctcgacctctccactctctcggggaggacgaggcagccttgacccacgagggctgatgaatgggtaggttatcggcaggctcctaggccaccagcttagaggtcacattgtcccttttagattcagtgtggcgggaatctaaaaggtcaaggatcgagaagcctgcaggatggcaacgtgagggaacctggcagtgcgacctcaggaatccactcccggaactctgactggggtgcctgtggaggctctgaaggtacagcagccaggcgctctgtggcattctgaatactggcacgcagccttcggcctctgccagcttttgtgagctgccctgcaccaggcagagggggcccccaggcctggcacagggtctgacacatggcaaatgctacagaaatagctgtggaccgcctgactgcaagatcgtattgaacatctggtgccgggcctcagcctgtgctgctgcagccaggagcaaatacggggaagtctggctaaggagaacgcgtgcctgtgtgggccccaaggatccatctccagatcaggaggaacaagcccgatgaccttgacaggcagctcaggaggtttctggctcctgccccagaggcccaagatgaggacgtggcaacatagggaggcccagggaatgatgagctcagggagaggtggccagaccacctgagacacctgttaaagtgcactttcccatgcccagaactgcgagctcctgagaccagttgcagaaaccagcatgttttactggctcccaggcggttctgatggaggatgtcccaggaggggactctgagatgggctatttgtaatctacggcaactgcctcacaacagagtgtgttcgtggagaagaggaaactgggcaccgagggctcagaagcagatggcagataatcaggaatatgtgaaaaattatggcacctccatatataataaaatattacagacatttctaagggaaaaggtaggcttctgagaaatgacacagagattgcctatgacattaagtgtacaaaaccagggaacgttaacagtacacacagaacaagcaatcacatcttgtgacatacatgttacaaacatacacatgtataacatatatccctgtgtgcatatgtgcacaactgatggctggcagatggatccctaatccattgtcatctgttagccctgagcaggtgggagaaaagggcaggatgttctggccctgaattacatgctctgtatccttttttcttttcatgataagcacatgttatgatttactattatcctatttcatatttgatgatatgaaaattattttcctttctctaagtataacagtattatggttatacttcaaaagaggcaatatttttcagagacagtgatcggaaaatggaaccatctgggatttgctttgaaacaattcagagatgggggagtgggtgaggatgagaggaacaagactatgtgagtgggaaacggggggagctgctgttttattccctgctcttggaatgttgaagaatttaaaaaatgcttttaaaaagatagtttcatttttggaaaagtaggaaacagccttagggggagataaagacttgaaaagcccaggctctcggcagagaagacagcggggataggggtgggagggctggagccaggcgtgaagagcttgctgggctctgccaggattgttctggatcctctccacccaaactaaaagtcctccaaccctccaggttaaaaatgggggttacaagagctctgccacacaaatggagggttcctgctgcattcatcaagaaaaaaaaaaaagttgctacaagaccctcccccacccacccacacctatccgtcaagcatctaagacagaggtctcaggactaacaagctgatcataaaaatgccccaggatcccactttgtttgtgaaccactggttcacaaaagagaacacacccatgtttatgtcaatggcaattttgcaaagcatgtttcacaggaaagttcagatgttttgactcaccagggaatttcaaaatgcttaccatgatccgaggtaaatgcaatgatggtgctgttggccagctgaagatcgtccaaagcactcaagaggcggccgacctgtgtatccaaatatgacacagaggcaaagtagctctggcggattttccgctgcaaattgaaaaaaaataaaaatgagagtgactgcaatttaaattgccaaggcatacagagataatgcttgcctgtgcatctctcccaatccctaccccttagttgatgcccttaatgattttctcagccaaaatgtaacactcctttccctaccatcagcatcacttcacccacagagtcacagcaaaatctgtaggtctacaaataagatacatttctaagcaaatcagatttcactttagggcacagatcacagtggatgaatgtgtcacctactgctctgttgttttaagctgaaatgtattgtctcctagctctggaggctagaagtccaagatcaaggtgctgggagggccattctctccctgaaggctctaagtagaagaatcttgcctctccctagctggtggtggtggctgtcagtccctggcattcctcagcttgcagctgtatcactgtgtctccatcttcatgtgttcttcccgtgtctctctcccctcttcttaaaggacaccgatcatattggattaggagcccaccttactccaatatgacctgatcttaactaattacatctgcaataaacctatttccaaatatggttacattcagcagtactggggggttaggatgtcaacagcccttttcagggaaaaaaaaattcataatttaacacataacagcaaccctgactgagcctttccctctgatcacttgctaacccaacagcagattacaactgcatatcttcatgaactatggccgttacgtggagctcatttctaacaaactgtcagcaggcaggagaagagcaaaggagataccagagagcagcacgtccttcacagtccctgaacccaagaggcactttgggaacagccagatcatgccctgaagtaaatgagccaccggcccctcctgggctgactctcattcccaacctggttcacaaatgctaaggacaaaaattaatcttccaccccaaagaggggtgagaagagagccgtgtcttcgcagaccagcccctgacttatcagctggacccaccagcttcttctcatcactgccagggtgaggacaatcatgagactcacccgttctcacttgcagtcaagagaaaagatatacatctagccttccagcaggattatgctgagccctggcctacttatactttctggtagatgaagtcttcagtctgaaacctgtggaactttggtcctcctggggatgaaagacacctgtcaggatggctatgtcctatacaaaggtattccctccttcctatgctagcccctggacgtaaggcaataagcagacaaggtcctcacccttgatgagccaccccatccagtgaggacacaatcatggagacaagaaaatgcttaattatcagtgaggcctgctgggtctgtcctgcagaccctggcctatggatgaaatgagtactcagacacaggtatgcagcataagagcagctaggttactgcctggctctagtggccagagagcagccccgagaagctggagctgctggcttttattcagtgcaggcataatgccaaaaacctagagccaacctgcaggtaattaacatttattgttcccctttcagggaacctcacaagcacagacgatcaaaggtcagttcctggtcaacataagtaaacaagcctgtttaagataaattctcccacactcccttgtacctactccttgccctctgcctcagggttatagaacagctattctcccctggggctctgcagaaccttctgacctttcagaaggtttgcatcctttccctatagtttttcccaccactctgaccgatcccccacagaggcccaggggtgacacaggggaataagccctcaaatctgcctgggagattcagggaaggcttcacagaggagttagaatttgacaagaagcacctgcagtcagacaaatggggctcagatgctccaagcaggggctgcagggcacggaacagtgtggagttgtgacagagcaggttgcatttggggccaatgaaaggcccatgtgactggagaatcaaatgggagggcagaggggtgactagaaagttaggtccgggccagataatatggacctggtgggtctatccagggagtggagactccaagttctaggccaatggagtcactgaggtctttcaaggcgagaaattgacatgatctgggcttcaagttattaagagtcctgttgcaacaggacacagacacagattccagaggctttagacaaaatggtactaggccactgctgggtacataagaggtgctcactacacttgctgaatgaacaaaacaaagcaaggcccactgaggtggtccagaacaatgtgctgaaggatccagaggactgtgtggatgtgagaggaattcaggggcatcaagcagacatgggggcagggagcagaggaggaggaggtgttgaggaacccaagggtgactccaggtttcacattcagctggtggcataattcgctggcatttgggggcagggggcgcaagaggaggaggaggaaggagaaaaggcagggcaggggtggtggcctgaccacgcggaagcctatggagctgaggtctccagggtcatctgcctaggaatggctctcacaggcaggtcaacacacatatctgaaaatcaggagagacctgggctgaaggggtagttctggagtcatctgccaaggctcaactgagcccagcaggggaagaagaggtggaaaggatatagtggggggcctgggaagtggcacctaagtggcagacacagaaaggattgggaggccaacagtcccagaaggggtggagctggccaacagtgaggaagtgacacagagctcaaggaaggtcaggacctacacagatagattttactggccaccaaggtcagtgctgaggtgagagtttagtggattggggaggtggaagcctgtgtagaggatggtgaagaacaaatggacaatgaggccacagacacagccagaacagcccagtgtgcactcgctctgccttggaggtcaggtgaaggagtggaaagcagaaacaggcaggggcaagggggctggcacttttgcagctgggagggatgagagtggatggagaggctgcagggtaggtaggtgagaaggaagatcttgctcattctgcttgcagacgtgggaagcagggacagtggtggggagttgagggaagaggcctcgagcccagaacatgcatacacaaaattccaggtctcagtgacagagattattaatagagcccattcagcaagtacacactaggtggcatctgatcctgtgaacggcacattaaggactccaagactcagaaaggttaacttgcccagagtcacacagctgataaggggcacagccaggatgcgtacccacatccaccctgtccgatcccctacctctggctgtccaccagcttccatttctacaagaggaaaggtgctatccactgagaaatggggcacaggggtggcaaaggcctggaggggagcagtgaaagggagtagagaagaggtcatgcaaacggagcagctgcagaggacaagtgaggtgagctgagcagagagcttgcctgggctgctggggctggaggcggggcatctgagggcctccctgcttcgtgggggcatggattttctccagcagctttcaggacttggactacagagcagagggtgtggctggagtgtctgacgataaaggtactgcaggaggggcaaggataaatggacaagtatggtgagctgggcggctgggaagtacagtaagtcacctgccaccaggccttagctatttagggaagcaacaaagccaacaggacctggacacaagggggagatagaaatccatactctagcaatccccgtgaggtagagcaagggaagtgctaggagaagaggttgtggtcagtatggtgactcggaaggagcaggcaacaaactcctgagtgtggcccctgaggtcactggctcatgtagagctgagttagagggctggagctgaagagatcccagagctgagtctcaagggtgcagtgagatgggcttggatgcggacatccaaagctacaagaggacagtgagcaggccagagttcaaggggaacacagggctgagaccagcacatgcaggcatcagggaggccctctgagtcatgctgtccactgtgtgtaaggaggggactaagagaacttgaaggagatagctccgtgcagccgacacggtcctagatacttctacatgctctctttggttcttgctgaaaatctctaaagtaggtgttatcatggaaaaactttacctaccttgtttcagttttatagagaagaaaactcagggaggctcagggaggtaacatgacttgacagaggttaggcagctggtatgaggtagaacatgaattcgaacccacactgctgggaaccaacagatccaaccatggggctttggagttacagtccctggggatgaattggctccacccagcactaattttgtgctgtcagacaagtcagcacacctcccatgccttgagtttcctcacctagacaacagagagcaggtacctcactaagtccccatgaggactaaaggcgataccacacatgaatcagcgcccttcctggcacacagtccattttgaagggtcattttaagtgaccatcactaataaagcatccaggtgcagcctcagagccagttcaagccacttcaccatcaggagcccagaaacacaaaattagaaaacaaacagatggatgcattgctttccaaactctcagtgaaacaggaatcaaatacatttgaggaatgtacacctctcaccaaccaaactcttgttgtgcaaactcaggggccaagtaagtttggatagcaagggatatctgtatgcagtggttttgttctgtgtttgctttaaacaatactctacagcagaggctctcaaacttctgatgaatcagaatcacctggtgtgctttttttttttttttttaagaaatgtcggttgtcaggtcaagttccacctccagcttccaattgtgtaaatctgagtgggccaagactttgcatttccaacaagccctcccagaaattctaaggcaggtagtccaggatgcacactttgaaaacactgccatcttccatccgctatagcttgcctgccacagcattcatgtggtaagagaagggcagggttctgtgtggaatattccagaaagagcattagtcaatgtgtattctgctctccagggagaaagggtgactgatgagtcagtgtgaggattctaattgtgtggttgctccgcccctaaatcatggcaaaggaatgccggacatcacagctgggtggcactggccatgatggtgtcccagttccctctgcaccaagggcctgttcaccaagccaccccctgagagtgacagctagccaggatgggctttcccacagagggaacctgcaagtaccagcaaaccaagcattctgggctgctcgggagttgcccatcactctacaattaatgagctgtcacctgaacagtatcccctgggttaggaacggtcacccaggctggttccccacctctgtgtccacacacaacaagtcaccaactctctggacattcccttctttagaaagtaagacactggttgggagagtcctgatccaggcaacactgcctgtgtcctaaatacctataggacacctccaccccagcactttgcctgataactcacacaaagaaagctcttaataagacattataggtggagttgtgtctactgagaagagtggtttcacctacgacactatgtcatcagtgtccaatacatccccaaactatgtccttgatacctgaaagtccacaggaattggaccatacggcacactgatgtttaaggcttggacgtcttcccgttgcctgatgtccatccaggggttgtaggccacagggggtaggccatcagggacctcgggatcgggggccagggtgatgttctccaagggatacaacttctgaaattccttggggaaaaacacaaagccacaaagttgtcactcttttagcaaaagcacaagcttgtggctctatcactgtctatactgcctttcctctaagcctgggatgcatttgagtggtggctcactagcattccccacgtgctcggccctgacctggaagtccagccttaagttactctcatgagatgccaatggcaatgaaatcatacgacttctgtttcctacaaactgagcagcaacaactctcttccttcatacaaacagacgcccttctgttcctgtccccacctcctgcctggctagaaaagtgtggtgaggtgttgggttcccaaaaccaccctcaggttcagcaattcactaggggaactcataggattcagcatttagtctcactcacagctatgacttattacagtgaaacacactcagcaaagaaaaaaggcacatgaggcaaagtctagaggaaactaggcacaagcttcaagtcctcttccagggaagtcacataggatacttacttctcccagcaacgagttgtgtgacaatacatgtgaaatgctgctaactagggaagctcattaaagcctcattatccagtttttatttggggctggtcaggtaggtactatctgtctggaacatatcaaaattccaggctcccagaaaaaaaaaaacaaacccaagggtttatcatcaaccataatgtttgtctaaacggtttaagcatagtaagccaattctgggaatagtgagaacacttcagaaatcaaagttcccagatgccagccaagggctagacttataagcaggcctttcaaagaatcacagccaggccagctttgttaactgttttctgcaaagaggcaggagaggtgaacctcacagccttcttctatcaagggggctgacagctcctactaggaaagcaagatcccctgggccaatcaaagcaagatacctgcaacatcaaagagcatactgctggtctctactctcattacatgtgaggggcattctctgcaaagtcaaaaggatgggatgctcaggccctcataaaacatgatagggaaaaatggaaaaggattctaaaacagaaaagactacatgctctaaatgacatacaagcaagtacaggatttgaggttccaagaagcaatgcagtgctttgtgtttagatgatctaacctgacaggctcagggggaacaggcagtttttgaagagagtttcacattccctggggctgttttggaagggccatcccttattacaggctttggcagccagctctgattcactactctgtggtgatctcaccatccaacccaacatctgctcaataagttcaaggaaaggaaatcaaaccctccagtggagtgaagcggaaagccaagcatttcttacaagattcttacatgttcttggccttgacctctaaatcccatctttactccactgaggacactagtgcccatcaggcaaccatggtgcctggcgatggcaggatgtagccaccttccctgtgcaaatccctccctcaacaaacaacacagctgtcacagctgtgctggatcagccctcaaccagctcttcaccttggggtatctgaaggggatgtgtggcttatgatacccaacggccaggaagaaaggactggctgacgttttcatcttttccaacaactgtatggcttgctcagtgctctgtttgtcaggcaaggtgccctcgggaacatccagcacatccacagggcaaagcaggttggcatggagttctccatctggccctcgacatgtctttcaaaacaaaataatataacatcagctttttaagtgcaagaaatgaagccatgaaggctacacacacagatttaatgttcacataatcagcccttcacgtgttagtcactcagactgaacagagacatcagaagtagaactaagacagaaaaggtgtttcttgttttccaggcaggggccagaaatccactagcacttggtttcttgctactaatactctttctccagatcataactaattaaaagaaaccccgatagactaattataaaaaaaaatccatctctaattcaacaattaaaaaatgccaattaaaaatgggcaaaggatttggatagacatttctccaaagatgatatacaaatggccaattgaacatggaaatgtggctaacatcattagtcattagggaaatgcaaatcaaaaccacttcacacccaaaaggatggttataattttttaagatggaaaataacaagtgttgacgaggatgcagaaaaattagaaccctctcacattgctggtgggaatgtaaaatagtgcagccactttgaaagccagtctggcaattcctcaaacagttaaacatagttattatacccaaaaaaattaaaaacatatgcccataaaaacacttgtacaaaaatgtcgacggcagcattattcctaatagtcaaaagtagaaacaacccaaatatccatcaagtgatgaactgataaacaaaatgtggtacaatagacaattatgcagccataaaaaggaatgaaaggctgggtgcggtggctcacacctctaatcccagcactctgggaggtgagtggattgcctgaggtaaggagttcgagaccagcctgaccaacatggtgaaaccccgtctctactaaaaatacaaacattagctgggtgtggtggtgggcacctgtaatcccagctactcggaaggctgaggcaggagaatcatcgcttgaacctgggaggtggaggctacagtgagctgagattgcgccattgcactccagcctgggtgacaagagtgaaactccatctcaaaaaaaaaaaaaaaagggaatgaagtaccaatttatactgttatgtggctgaacctcaaaaacattattctaagtgaaagaagccagaaacaaatggctacatagtgtatgactctatttataccaaatggacaaaataggcaaatccatggagaccaaaaatagttcagttgttgtcccacgctgggtgctgagacaaaatgaggaacgactggtaatgggtacagggtttcttttgagagcgataaaaatgatctaagatcgatttgggtgatggctgcatagctccgtgagtatgctaaaaaccattaaattatatacttcaaaagggagagttttatggtatatgaactctattttaattaaaaatttaaaaagaaaaaaaaaacccatttcaaatttcaaagacaggctaaggcttgtaagtgacagggtcccaatcaacttgataaggtgacagtccatggaatttccagaacttcagctacactaggcacagaatgaaacctcctgctttgcttcctaaagtagacatgctggccgtgagaccaaagttagttctgaccatgatttgtataccacaaagaccgaggggctgtgtcagctgctgttccatctcaaagagtgttgccttttcacagccctgccttgctcaccccacccttgggcaggacagcccagcacccgcctcagaccacttgttcatcatctatatatacacgatttgcagcactcgagggagatttagtattgtcagacccaccactttgagaagaaatgggtagggggaagttagggcagggacctggcattcgtaagtgaggccactaaaaagaagcaagatggcttcagggaattaagatgggatcttccctattcaagccacaagccaaaggccagagctcacagttttcactgtattctgaaatggaaagctgtcaagaacttagaacaataccttccacctcacttccaaatcctcacccttcccaacacgatgtttactaaaacctcagagatacatttcatgtctcagttccccagctggttttctgagtttcttaaatgtgggttttagtttcatttatacatttgggattcctctaaaccaagattttctttgtaggttactttttttcataatgctctaaaaattcaaaacccctatcagaggtctcagctgctgaacatacacattaggtcagagacagatacacggcatgcctttctcccattctgggctgaggctcctggagctcagcctcttttctccctcccatgtctcagcatctcctacaactctcagtctcatccagcgtgagcactggggagctattcaatgagtctgacacgttagagcccaaggttttagaacaagtagcacccaccagcttctagaatgaagccactgctcctgtcgggcctaatgctgaagatcccaacacttacttctgtcaaaacattatcacaaatgaaacccacaacttcgtggtatataaccagcttcacagaacatgcagtatacccagtagtttatgtgacaaaggaaaaagtggttcctcttcagaaatgtccctttcacagccttaccttagtgttttcatacttctcagaggaaggatgataaggtggaaaagaccagctatacggagaatcatcggtatggttagaagatatcccttggaaaaaaaaaaaggttgttaaaacatgatgagtctttcaacaccccactccccataattaaaactctgtaaacaaatgggcaagtggaacctcccttctttggggctcagtttcctcatctacaaaagtcccctctaaagccaaactctctagtttctatttgagaactaagcatctgacttcctggtccctaagccctgatgatttgtgctaggctctgtggaagggacccacaaggacaagatcagtcagctccttagagcccatgctgaaacctatctctcaccctatgaaggaggcagcagaggcatcagcaccatcagggagccgatgggggcaggagagggaggctcagggaaggtatgtgacttacctatgctaaccagatattagataagggagccaggactcaaaaccttgttttagaattccaagttcaagtgctcattcatgaagcagaaacccacccttaagcttagtagtttatagtttatttgtgaagacagtataacagcactggaaaccaaggaaggacttccagctttcaaaagcatcgaagtgccaagtgggggatcctccaagcacagaggttattgtgagtcaggtgaggactggcagggaggacttctaggagccagtgaggcctgtgagggatctgaagggaagtgctgcctatagtggttagctgggagtggaggggatcacaggcagaacctcgtgagaaagcatcagcagcagtcacacagtgggactcccatagggagtaccagaagagacaggaatggagagaaagagggcagcgggtggagggcctatgaagacagcaagcactgtggaaagagcacacaggaagccaacaaccacaggtccaaatcctgatgctgcctcttagcatccttgcaacctctggcaagctacttgactcccatgagccttcatgtcttccttgggaaatgatgatgatgataaaaacccaccttgcttgctgttgggaggattaaaggagtggccagcatggtaaacggtacatacctggcacacagtggtggctactgtcatcttgaagcaggcccaatgctaacagaaaaaggtcttgagaacaaagattcagctgaaaaatgtgttcccacaagggctgcagggaaaggtttattctctgagaaggacatggtgcttagagcctggtgccaaaatccaatcatcaggagggaggaggtcaagcaacatcactcagtccttgcctggtttcccctcccaaagcacaatctcctccctctgctgtgtttcctcctctctccaaaatcatcacttccctccagctgcatttgggcaaggggtatggtaatgagaacaccaaactgcagaaagttctcctgacactggacttttggctgtgcaatatgattcctgacaggttcacctctgaaactggcctgacttagtagagctgaatgtcactctcaacctgggctggccagctgagctcctgcagaaggctgccaagcctgccggtgtaaccactgagcaaagggaaagagactgaaaacattcgtcattcccaaatgataagcattattgtccctatggtgctcttgtcttccaatacttttttctccattttttttctcaaatactcatgcattacttctataaataaaaagttttaaagtttgtttgcttttcactatccccatattggcattaaagagagccagtttatcaggcagcatttgaggtaaggaatgtccgtctctgggaccctatagatcctgggtaccagattacactcatctttctgacttaatttccagagtggatagcagcccctacctaagcacagccccctcattgggcaataagtcagcaacagcaatgctggccacacgggaggccctcaggtgtcctcaccccacccctaggtttactgacaggtaccctgcaggggagagggtggggccctgagctggactccacccaacactgccacctccccagcctgtgtcctccctaccacccgaggagctgaaagacccaacagcacaccctcagtggtttctgaaaggaagcaaagctctttctaccctttttcactttgggtgaaaacgtggctgggttgacaagtcagttttttagaaaggaagcactgactagcgagggactcgcccagccagaagagggctctgcaaagacagccccatccccaggatgggaatgctggattcagacaccacaaaccaagagaacccagactctggacatggagcagtaccagggtgaaagacttttcccaccgacatggtcacatagccattctccttgaagtactgggggatggtggagaagtttccagcgtgcaccctccagtaggagttgaagtcgtacaggcgggtggtgtcaggtctcctgccagtgaggaaagaaacgcggctcggggcgcacactgcttgctgttagggagcagaagcagaggtaagcatcgccacagcaaaacatgtctgccatctcttaggtaaccaagcaaccgcctcccgaggctcctagcaaacagcttggtagctgagtcatgcagagctcaaaccagacactgggatttgggtgtcacctaggcaacagactgcttccgggagagaaaagggaagcaatcagcccctgaaaccagcagatgcttatctcctcctacgcaatggcctccccaggcacacagagcggccagtgttgctgggggcagagccatgagggggttcagggagcagggccaccctggctagctctcacctgaggcccagcctgcagacctgtgggtgcccttctgcagcaccccttccttctgagcaccaggcaagcgcccgttctgggagaaagctggccagggctgccatgaacacatcagggccagggcgcaccttgcacccaaggagaaggccacccttgaaggtcaagctttcccatgagtggaaaaccagattttctccactaccattttccagactatgcttccctctaacaagatgtcccgcacaatctgtgccatctgacaatagctgaagctccccgcccccaaccctcagtgcacgaagcagcacacacccacagctagaggttcccagacatacctgcgcaaaggcattctggaagaggaggctgtgggatgccagttggtcaatatttggggacctcaccagcttatccccataacagcccagggaggggcgcaggtcatccacgatgatgagaagaacgttcagagcatctacacaggagggaggggctttggtgaggtaacctgcactgacactgaaccctccctcatggtaggtgctaggttactaagaggcccaaggctggaccctgcaccttaacagcctagccagggagggcgctgtgcctcagcaagggtgggagtggggctcgaggaggaagcctgagtcctgggtggcagggttaggctttggtcatggcctccaacctgggtgaggaagcgagatagtgagtgaaagatggtggaaaggaaagatgaatttaggaaaaaaagagaatgatgtatgcaggaaaggacagatggttggatggaggaagataaggaggaaaagatgaatagctgaagggaagaaaggatggagagaaggaggggagaagagagagaaatatgaatggatagaaggtaaaagggacggatggaccaatggagggaggaaaggagggggaaagatggatggatagagatgggaaagatggggggaaagaggaagggaagcacggagggataggagatggatggatgaatagatggaaagagggaagggagggatgaagggacggtaggaaggagtgaaaaatggagggagggaacgaatgatggatgaaagaaggaatggtaggagagaggaagggtaaaaagaatggatataaacaaagaaggaaggaaagaaggaaggaggaaggaagggagggaggaagggagaagagatggcagggagggcgtgggcggcacctgtggtcgagttggcctgcgtttcggatccgagggcgacgcagacggagctcagaaccagacccagccagagaaggcctcggccggtccggggtggcggcatttcggcttcgacgcggccgcttcagagcggcggggacaggctgcagcaggtggcgcagttagcagccgccgccgcagccacagagacctcctcgtcgggaacccatgaagactgcgcaacacagccgccgcccgggcccgcaggcccgggcgctggccgcagcgcgagtgcgtccgtgcgactcttccctgcgtcccctcccctccggggcgggttctagaggtgcgcgtcatcctgcagcaataggcgtggccgagagacaggcgcagagcgggggcgggccagttgccttgcaagcttcgcagacccagcggcccgcaggcccctaggtgtagaactgctaggggtatagcgattcagccactgcccttaacaactagcagttacccgtctttttgcctttgcttgtgctatgcctttcacctggaagccctgcccttccttctttttataaaagacacacttcttgtaagccagcctcaatgccattctccttccatgaggccttttgagaaagtcccttcctccatctaaagggactccctttcctattcatttcttcaactaattcttattaagtatcgcaaatatgtataccaggcgctgttggtggcactggggctctatgtccctgctttggtggagcttaaaacaataaaaaaatatagagagtgtcggtgggcatacccggtctggagaaaaataaagcgtgggtgcggggcatgcttgttattttctatggggtggccaggcagggcctcactagtgaagtggcatttgaacaaaattttgaagcaagtgagggagcaagccgcattgaggtctgcaagaagggtgcgccaaacagagagagcagcaattgtggggagatggaatcctagccctacactgtactgtactgaatactattataccgtcctaatactgcaaacacagtttgattttcaactttgagaatcaatctataacaaagcccagatgacttaattatgactaaacaacaatggacaatgggaaggtacaaatacagctgtgatggtgctgtggtgcactgctcagatctcccttcaacaccaaaaattttatttccctagctggcttgagagctgttagctgtcgttagccctcatcagaaattgtcttagaaaaagataggtacctcagccaaggtcacccctgttctcaggaagcccacatcagtgattcaacttgaaggtacaaaggtgcagccccttaccccaacttgggacatctctgaaaggccatttcagcttcagagctccctgtggggttaactgaagccttttttgagactgcccactttctctgtctgttgaattttgatttcttccctcccctccccttctacaggtgttgatcctaagagtactccctaagaaacttcctgcacattactctacatcttagtcagcttccttgggaacctggcctgcagcaacagttgacaaaaagctgggaggaggaagggagatggcaggaaatgtaggcacattaatttagggttagcattttaggattgtctcctttgccccagcctatcgcaaaaaaataataataataataataataaatcaatagtcgctatccccagttcatagaaagagaaatacagatttagggatattacttaaagatacaaaagtaaacaatagaaaacttaaaaatggcaataaatctatatagtaaaaggagaagggaaaatggcagggagagatgaaacaaaatttgtcatgagttgataaccaatgaagttcattgatgaacacctggggtttattatactattttctgtaatcttgtataggtttgatcaatttccaaaatccaaggttaaaaatatgtacataaaaagaggaatggataagtgatctcatctatcataggaagaagtcagcaatgtctaaagttgaaaacattagaaagttgatatagaaatagcatagtatttagaaagacagggacaatctactagaagaaatgaaagtagaaacatttaaaatgagaacagaagagggaaggtgcagggcagagggcctttgctttgtatggtatgtcttttggtcctttttgacttaggtgttagtgtcctccccccaaaaattgtatgttggagtcctaacacccagtacctcagaatgtgatcttatttggaaacagggtctttaacagggtaatcaagttaaaaggaggtaattgggttgggccctaatccaatatgactggggtccttatcaaaaggaaaaatttggacacagacacaaacacatagagagaagacatccatgtgaagacaatggattgaagtgatgcatctacaagccagtggatgccaatgattgccagcaaaccacaagaagctaggaagaggcaaggaagcattcttcttctataggtttcagggggtgcatggtcctgctggcaccttgatttaagacttctggcctccaaaactgtaagacaatgcatttctgttgttctaagccatgtaatttgtagtactttgttacagcagccctagaaaactaacactacctataaacaattcaaaatttaacaagattgattgtctcagctgggatagaaaattatatatgccacttggcacaattgtgtgtgtttgtttttgttgtttgtttgctctggtgtaagctcgaggttttgctggggctcatagcagcagaaggacaagagtgggagcaagtggagagagccagtaagagagcagttcaggtggctgacagtggttaagaagactggtggactggggacaaacaaagatctaggagatgggtgaggatatagagaggcagcaagggtgtgagagtactggttttagtcccagaatgagaccctgaaatttaagatttctgaggtaaaacagatcctggtgatttaaaggtcaaggatgtggccttgaagctgggaggctgaggtgggggggaagagattgctagaggttagagatgaggaagaagtcaagggtctgtgagtggcacaggctgctgatgaatacactgcagtcccccagaatgatgacaggacacagggtaccaaggtcacctgtgagcctggtacctgagtcttcagtgaatgagggataagggccaatcaatgctatgtaacaaatgaccacaagcttagtggctgtaaacactactcatttgtcacctcctactttctgtgggtcagaaatccaggcacagctaagctgggtcttaggttcagggtctcaaaaggctgcagtgaaggactacattctcacttaaagctcgggattgcggatagcacaatccacaggtgctcaagtcctttatataagatggtgcagtgtttacatataacatacatacacatcctcccgtatactttacattacctctagattacttataatccctaatacaatgtaagtgccatgtaaatagttattatactgcattatttatgaaataatgacaagggaaaaaagtctgtacatgttcactgcagagacaaccacccatctttttcaaattcaacaggtggttgaatccacagatgtggaacacatggataaggaggctgattgtagtacattctacccatacacaaggggtcacatacactaggaggcaggaaacttgggggccatctagaatggcatctaccacaaaagagccctatcttgagtctcaactccaacagataacagaaaatttaatctagtcaattccacattttcccagttacttcgggattgtcttactaattaccaattattgttatcaagcaatttaggactgtctcctttgccccagcctatcacctaaattctgtgagactcttaaattcggagagagagagcaagagagaagagaatctgcttgttgtcaatggcaacctgtccatgccagcatccactcccaatgtacaatcccatccagcgctcagagatggcataccttcatgctgtcttccaatgtggtgtcgtcattctaacctggttcctagctgcacagtccatgccattttctatgtgacattttttggagacgtgctctccctctcgctctctctctccccctctccctctccctctctccctctttctctttccctctttctctctccctccctctcttacctccttggaggcacgggaaaattcaactgctttcccatgccactttagtgtcacaggaagctcaggggactgctccagacacttctgcagctaagatatgtggatttggtgtgagaggagttctaggactctggaccttctagggtaccatacagcaaagggagtccccttgctcttggacttctaccctacccccgcctttgagcctaactccaggaggaggggacaatgcacactggcaaattggtatatagtcccacacaatggtaggatgaggattcaggggagaattcaagatttgtctctcattccagatccagggatccttggatgggcacccctcaagggcaggctctgccctgtccatttactactgtatcccaggggctagtaccttcgtggggtttcaagggctcgggatgagaaccatgatgagaactacctggatgaggaaagggagtgtcccaggctgtcctcagcccaatgccagtgagggctctctcccctgcagagtcatagggagggccctgggctctgtaggcacgtgaaatggtgttccaaggaggagtctaacgtgggctgtgaatgttacccaaatgcgctgggcacggagggcactgttcccagaagagactatctcaaggtgcgtgaggcaacgtgctagaactctgctctcaatctgaactctggagagtatagatggtcatccataggcatctagttccgtagccaggtctgtgctaccctgaggactaaggtgcagcagtagcagccctaggctccctggggttccagaggagtgaaagtgaatggcaacacagccagaatctgattctgttttacttcccaggaagaagtgaagccgcatggagcatgagggggcagccaaggggctgggcatcacagaagccctgacatttgctgggctcctaccctgcatcacatactatatcaaaaactttaggagctgagatattctctcacaatggaagaggttagtctcagtcccgtttgcctgtggacatcttgcatcgtcctctgaacaatctttcccttccttcctcttctttccagttctcgtcccaccgtcttccctctcttcttttcttttttttcctcccctcaagcccaagactttcctgtcatgccaggcaatgattcagccacttcagttctgggtggatggataggcagggcttagagcaggcaaccctcatgctgtcaaagccaaaaagtagaggaattataaaagcctccaccaggggttgcctaagctctggtgttttgcccccactactttaaaggcgattcgtttaaaacaaaacaaaacgaaaaacaacaacttactttgtaaagcataagcttaaaataagaaaaacagaagtgcctaatcagatctttggaagtattgcattgcactgtcactgagtgatgtatgactggctgtctttctgtttggactgcattcatctgaatggagtgggtacattggctaccgccttttctcctggttttcgctgtttctctttgatctagaaacgatttattcttactcccccagatttctttataaagagccacagggaagggaaacaatgatggccgtttgggaataaaggagggctctcacagttgaagttttctccatctgggcttgggtaaggagaagggcttctggtccctcaggcctgtcagtcatatacctgggacctgtcccgtggtcatatagaccagaccctgcacacctgcagtctcaggttctgacaagcagatatcttgcaaagcggagcccacagctggaattcaaggcaaagcccatcccctcttgccagcaaggcaggagtgtcccttctgaagtaaaagccagaggacaagatggactgggaaacactgcaaagacattgctcctcggcctttggtgacgttcctccaaggtcccctctcacaggtgtgttatgagacatacctcaggcatgagtggacgcatcaacaaaaggaatagctaaacacagcctgaaataggatgccttcaaggggacaaacagaagtgtaggaggaaggatcttcaaagacatgccaaattaccgtgactcattaccatggccctcttaagatcagtgctcgcaagaagtcagtagtttatgccaaacaagtatagcaagaagagcaaccttgctgggtgggtgaggaaaatcagtcctcttttctatgacatgagactaattattaaaagaatttcaattttgtctttaccaagacatgagttccttatgtactgcatgctgtcttctgctttttatttgaagaaatgtggcatttgggaagcagcagatgtcccccctgtggaatcaatgtgaaatgatatttttgtaacatcattaaaaagtctatcaaaatgggaaatttctctaacactttctaagggaccaataaaaacactcagaggaggaaggcttatcagcggagattcttgctaaagggcaagtgtattcacatatgaaacatagttttcaaagtcctcagagcccacagctgggatttctttccatcgaatcttggagcctaagcattgcagttaaatcctgggcaggagcaaagcctcgaggcccccagtcttaacccttactttgtatcccaatgcagaaaccaccagcttgcccccagctggctgcctggttcccacctttctgattgatggtggctaagcagtcacatgatagggcagtctaaagagtataaactctgttggcacaatgtctcacacctgtaatcccagcaggcgtgggagggcaaggcaggaggatcacctgaggtcaggagttcaagatcagcctgaccaacatagtgaaactccgtctctactaaacacaaaaaaattagcgtggcatggtggtgggcgcctgtaattccagctacttaggaggctgaggcaggagaatcgcttgaacccgggaggcagaggttgcagtgaaccgagattgcaccactgaactccagcctgggcaacaacagcgaaactctgtctcaaagaaaagaaaaaaaaaaaaagtatgaactctggaatcagacaggcctgatttcaaccctagctcctctgtgaccctgagccactgctaaacttccctgggccccatcaggaaatgtgaatcccacaaacagccagcagagggacccactcccagcctccagaaagtactcaatcaactgggcctttgtgaagcaggttctgcctgcctggccagagactagcttgtggagttccagatcctagccttcttagcctgcttcagctccagcccagatgaggcaaagctgtagcaattgctggctctcctgagccccacatggcttgtatcatggctagtgaacttcagagagatgcataagggccagtgaaatattttcagttctgaagccacagcctgtgccatgtgggggttttcaccctgcactgaggtgatgcatctggctaggctccagggctttgtgagcattttcctgagggccccatctatggctaccatcatgcagtgtaacttgttttcaacatcaacaacgagctgctcaaagaataagttctcttttgagaccagcctggccaacatggtgaaaccctgtctctactaaaaatacaaaaattagccaggcatggtggtgcaagcttgtaatcccagctactcaggaggctgagaaggaagaatcgcttgaacctgggaggcagaggttgcagtgagccgagatcatgccactgcactccagtctgggttaccgcgtgagaccctgtctcaaagaaaataaaataaaaataaaaaaagattaagttctcacaacagcaggctggagggaggatgacattagcactcttcataccactgtcagtccacagtggggtccaaagtcaaacaaaagaccccaacaccaggattgttttggtattcttttccgataacatctttgcggatcaaattcatcccagacttttcaactcattgaatcctcactgctgcccgagggactgtgcactacttttctctccagagtagcaatgcacaaactgaggcttggagagggtcattgctggcccaaggtctcatagcccctggcttcttaatcactatgcaacactgccacgggccagggctctgggctgggctgctaggccctgtgctttaagggtaaccatgatctgctctcataggcaaccagggcacatggaaggtcacaaggctgagagcaggggtggataggcaagagagtttccagaacataggctgtcagaaaaccccaattttacatgggggaaaagtacattttacaattcaggatccagattagttctaagttattactgttagctaccaagtctgagtgagtaagccctgagcaccactgtctaaagaaatttatggccctacaatgctgagatgtgggttctaccatcctcatgttacgtgatgagaaagtggacgtaagctgtctaaggtcacacagctagtaagtgacaaaggcaggactcaaacccagtttcagctagtgaaaagccacctcacttatcccctgtgctctacacagatttggtgaagaaggaaacgacagaacgcgtgaccacaataagcaccatgaagagaccctgggccatgcacttgctataagccagatcctgtgctaactatttcagttttgtggccaagtggtgtcacctagccatcttgcctccttaatgttcacccaagtcaggtgctagtcatgataaggtctgcattcggactcctgtcagggaggaaaacggagaccacaaaaacaaaagcaagacttcccttgaaaagctgctttcaggcatctttccatcctgccaaaaattaaccacaaacttcctagggacaaagagagctgccagcagagtaatgttgagaaggctgccgcacagcatcctgtgacttcatctcctgcaattaattgtgtctcccactcggcacctgtgaggaacatgctatgatagtagcaactgggtgtcatgaccacatttcaaaattggactcttaaagcaagtgacaccccagaattttgtgggtggacccaggctctgtgtgattgcactgggaggccacacagagtgcaggatttcccgacagaagactttgcgggcagatttcagttatctgaaatgactggtgtacacacatgcttgccaagggctcttcctatttttttagccctatgttcagccaatttcctccaaggaaaaccgtggatggaactaaatgagatttcacccacttggtgcaatttggtcagagggtggaatatccagccatccaggttgacccggggcagggcctcagtctcacctgtcctgggaagggcgtcctcatgaggtcaaggctggagaaaaagcacatatccaggaactctagccctctgcaaggcctcaacaaatggtggctcttactggtgttagtatcacatatgcacagataattttcagaatccagaaaggggatgaagtgtacagatcagtaagtagcacctctcagagtctagccaacacattgacatttaagcagtgagatgtatgaatattaatacaaaatatgataaatgaagaaaattcagtattttataaacagtttcgtatcatccattttaggttttactagcaagagaatttagagcaggcttatgaaaaagccttgccagagctttatggattagggttttgtgaataacagatcatgggtatgtattgccctaggcatcaatttccacacagatcaaaaaagaggcttcccgccttacagattcctggtactgaaatagccttcaattttcaaacctgtcagtttacccaagtcagaactctcactgcctccctattggcctggagccactacacatatttggttataacccatggatggaatctaagtccccaaacaggccatatcctgtaggaccttcaggactggaaacctatggtctcacggcgcttcttccttctccccaagctggaggcttttcactatctgcccatttcccatctacaggctttgaggctcaggccagcatccccacacgcttattcaaaggtcattcctgggaaaacagaaatgtatcttcaccactattagtaatactgtgctttatagtttacagatcgctcccacaggaatctcatctcccaggagacagactgagaagtttcattactcctgcaggtaggtggttaatattgtacccatcttctggatgaggtaattataactcagagaggtatagtgactttctcagagtcacacatccattgagtgatggagccaggggtcaattccaggtttataactacaaagtctgtgcttcctgccctgcttcccctgtggaggacagcagcctgactatctttatctgggtagctttctctttctctctctctctctctcacacacacacacacacacacacacacacacacaactttcctttataggacgaaatctcatagtttaccaaaatctctaaagctcccttgccagcaatccctcagtggacttgaactgatggtgccaggtttgggtcatggggtagcataaaagcaagcacctccatcaaagcagagcccctcttccatttactctctttccatcatgaggatgattttatctcatctgtcagagtgaccacttcctttcatggagatggtaggaggcaagttgctaaagaacctgacaaagacttagagaagcctagaaactcagtcccagggaccatccctcctctacctccacacagactcacacacacacctatactcacacacactcccaacaaattgggagcctacatctcccaggcagtttccacagcagagctgtgctgagagcccatgtctcccaactcccaggacaggctcagacacaggagccaaattcttcttgcagccacataaaggctgtggtgataaaagagagatgtttggcgagacacagcatgaagcaaatatatcctttaaccaagttctggccttaccctttgcagaaagatatggaaacaaataatcatttgactacaagaattggccctgtgggttctaaagtgggaagtggtgggaggaagccaagaacagggaagtgtaacagtgacacttggacccctcttcccccctcataggtaaagtactctgccgattctgttttacccatgtatccgtcaaacagggggtgatatctgagtcctccaccattttcttaagtgggcttgtaagtgtccaaacagcaggtgcctacagggcaggagacagctagggacaggcagaagtgtcgaagcttgtccttggagtctatcccacttggcccctaatacatgccatgtcaagctctagttctccttcccattccaaaaattccttaacctttagacccttttctttctcctggccaagtcacttctctcccacctctccctgcttccccgaggtccgggcttatctagtctcttgcaggagcagtttcaagagcaggcatcagagacttttggtgttaggtcagcagtttccttcaatctttgtttttgtcatagtgggggctggaggcatgatattcaggataaaagtaagaggaacatgttgggggagaatacacagtaaaacaaccagatcaagtcttcatgtgtgaccctccaacagtcctcccacaagtacagctttgtaacctccagaaaaagatagcctcttctatcttaggtgttttatcctaaaaaataggggctacataggctcaaagtaaagggatgaagaaagatctatcacacaaacagaaaacaaaaaaacagccagggttgttattctaatattagataaaacagactttaaaccaacaacagtaaaaaaaggacaaagaagggcgttatataatgataaatggttcaattcaagaagacttaactatcctaaatacatatgaacccaacatagagcacacagattcgtaaaacaagtacttctggacctacaaaaagatttacacagctacacaataatagtggaggagttcaacacctcactgacagcattggacagatcattgaggcagaaaactaacaaagaaattctggactgaaatttgacacaaacaattggatctaatagacatctacagaatactctatccaacaaccatagaatatctatttttttcatctgtacatactctaagattgatcacgtgatcagccataaagcaagtcccaatacattcaaaaaaactgaaatcatatgaagcaggttcttggaccacagtgaaacaaaaatagaaatcaacaccaagagaaactctcaaaaccacacaattacctggaaaccaaacttgctcctgaatgacttttgtgtaaaaaacaaaattaaagcagaaatcaaaaaaattactttaaataaatgaaaacagagatacaatataccaaaatctttgggatgcagcaaaagcagtgttaagaggaacgtttatagcactaaatgcttacatcaagaaaatagaaagatctcaaattaacaatctaatattgcagctagatgaactagaaaaacaagaacaaattaaccccaaagctagaaggaaagaaataactaaaatcagaacagaactaaatgtaattgaggctcaaaatccagacaaagaatcaatgaaacaaaaagttaattatttgaaaagataaacaagattaatagtctgccagctagattaacaaacaaaaaaaagaaaagattcaaataagtacaatcagacatagcaaaggtgacattataacccacagaaatacaaaagatcctcagagactattcttttttttttttttcaatagagacagggtctcactatgttgcccaggctggtctcaaactcaagcaatccacctgcctcagtgttgcaaagtgctgggattacaggcatgagccaccgtgcccagctgttcagagattattaagaacacctcgatgaacacaaactaggaaatctagaggaaatggatacattcctagaaacagaggaaatggataaattcctaggaacagaggaaatggataaattcctagaaaaacacaacctcacaagattaaatcaggaagaaattaaaagcctacacagaccataacaagttctaaaattgaattagtaatgcaaaaaaacctgccaacaagactgggcacaatgactcacgcctgtaatcttagcactttgggaggccgaggcgggcagataacttgagctccggagttcatgaccagcctgggcaacatagtgagaccctgtctctactaaaaagacaaaaaaaaaaaaaatagccaggcgttgtggtgtacacctgtagtcccagctactaaggaggctgaagtgggaggatggcttgagcctgtgggtcagaggttgcagtaagctgaatttgcaccactgtactccagcctgcgtgacaaagcgagaccctgtcacaaaacaaacaaaccaaacaaacaaaaaagaaaaacacctaccaacaaaaaaagtcctggaccaaatggattcacagccaaattctaccagacatccataaaacagagctggtattcatcctactaaaactattccaaaaaactgagagagactcctctttaactcattctacaaaaccagcatcatcctgataccaaaatctggcaaagtcatgacaagaaaaaaaaagaaggcctggcacaatggctcatgcctgtaatcccagctacttgggaggctgaggcatgataatcacctgaaaccaggatgcagaggttgcagtgaaccaagattgcaccttgcgccactgcactccagcctgggcgacagagtaagactctgtctcaaagaaaaagaaaagaaaagaaaaagaaaaagaaaaagaaaactacaagccaatatccctgatgaacatagacacaaatatcctcaaaaaaaaaaatactagcaaactgaattcagcagcacatcgaaaagttaattgtgcataatcaagtaggctttattcctgggatgcaagattggttccacatacatgaatcaataactgtgattcaccacataaacagaagtaaaagcaaaaatcattatcatctcaccagatgcagaaaaaacttttgataaaaatctaacatctcttcatgatgggcaaaagctgaaagcattccccttaagaactggaacaagacaaggacgcccactctcaccactcctattcaacatagtactggtagtcctagccagcaatcaggcaagataaagaaataaaaggcatctaattaggaaaagaagggctggaagggccaggcgcggtgactcatgcctgtaatcccagcactttgggaggccgaggtgggcggatcacctgagatcaggagttcgtgatcaccccagccaacatggcgaaatcccacctctactaaaaatacaaaaaatcagctgggcgtggtggcgggcacctgtaatcccagctactctggaggctgaggcaggagaattgcttgaacctgggaggcagaggttgcagtgagccaagatcgcaccactgcactctagcctgggcgagagagcgagactccatctcaaaaaaaaaaaaaaaagaggaaaagaagaagtcaaattgtctctctttgttgatgagatgattctatgcctagaaaaccttaaagactcagccaaaagtcacctagaactgaaaatgatttcagtaaagtttcagcatacaaaatcaatgtacaaaaatcagtagcatttttatacaccaaaaatgttcgagctgggagccaaatcacgaacacaattccatttataatagctgcaaaaaattaaaatacctaggaacacatctaaccaaggaggtaaaagatctctccaaggagaactccaaaacagtgctgaaagaaactatagatgacttaaacaaatgaaaaatcattccatgctcatagattggaagaatcagtattattaaaatatgcatatatccacattctacagattcaaaattattcctatcaaaataccaatgtcatttttcacagaattagataaaactagcctaaaatttgtatggaaccaaaagaaaaaaaaaagtccaaatagccaaaagaatcctaagcaaaaagaataaagccagaagcaacacattatccaacttcacgcgatactacaagcctacagtaaccaaaacagcatagtacgagtacaaaaacagacacacacaccaatagaacagaatagagagcccaggaataatgaagcacacctacaacaaagtcttcgacaaagtcaacaaaaataagcaataatgaaaggaattactactcaataaatggttctgggaaaactggctaaccatatgcagaagaatgaaactggacccttacctatcaccttatacaaaaattaactcaagatggattaaagatttaaatgtaagacctaaaactacaaaaatcctagaagaaaattctggacatcagcattggcagagaattcatgactaagtcctcaaaagcaattgcaacacaaacaaaaattggcaagtgggacctagttaaactaaagagtttctgcacagcaaaagaaactgtcaacagagtaagcagacaacctacagaacaagagaaaatacttacaaagtatgcatccaaaaatgtctaatatccagaatctacaaggaactaaaatcaacaagctaaaaacaaccccattaaaaaccaggcaaaggacatgaacagacgcttctcaaaagacgacatacaagcgccaacaaacatgataaaatgcgcaacatcacatctgagaaatgcagatcaaaaccacaatgagataccatctcacaccagttagaatggctattattaaaaagtcaaaaaacagcagatgctggtgaggctgtggagaaaagaaaacacttatatactgttggtgggagtgtaaattagtgcagccactgtgaaaagcagtttggagatttctcaaagaacttaaaacagaactaccatttaactcagcaatcccattgctggatatatatccaaaagaaaataaattgttctaccaaaaagacacatggactggtgtgttcattgtagcactattcacaatagcaaagagatgaaatcaacctaagcttccatcaccggtggactggataaagaaaatgtggtgcatctgtatcaccagtacttcacagccataaaaagatgatatcatgtcctttgcagcaacacggatggagctggaggccgttatcctaagcaaattaacgcaggatcagataccacatgttcttgcttgtaagtcggagctaaacattgggtacacatggacataaagacgggaacaacagacactgggaaccgcaagagacgagagggaggaaggatgtgggttaaaaaactacctattaggtactatgctcactacctgggtgacaggttcaatcgaaccccaaacctcagcatcatgcaatacacccttataacaaacccacacatgtaccccctaaatctaaaatatttatataagttgaatgtttttaaaaagaataggggctagtggggcaatgattgtacaattatgtgaaggtactgaatgccaccaaactggacatttaaaaatggttaagacggtgacttttatatgatatatattttaacacagtttcaaaaagaataggagctggggacactgtccaagctctgttcggtggtataacccccagtgccccacaggcaccacagctgcaaatggagctatgtgttatctttcctggatgcttccaccagctgagaatatgtcagttttgaggcagatgtgtttgttggaggactgggggtaggtatcatctatatgtcttctcccggccctgtcctggagcaggggcccttatgtagaaattgggtacttagctcttctggccctccctgcaccccatggcatccttggtgttcccctgggtcagggactgaggacaaagtcatggataggcctgtttctcagcactgcaggtcatcattctgtcctctgttcactgcctgtctccctattctgactcacagctggactcgcaccttccatgaaatcaaagttagctgctgttactttttgcttgggaacatgtccttcctgcctctgccaatctctttgacatctaggtgctcaagggaagcttcccttgtaagatctctgaggagccataggttatttctgcagagtccctgaactgctcctgttccacccactctggttccttattttgtccccaaccacactaacatgggcagtgtctgggcctccagctgtcagcttatatgtcctattcctcactctccatcccatagctgtggccaccattgcctagcttgattttggcagtttgtccctaagactagcagtccccaagaaaggttccaatacatgtgtcatctctatctttcacccccgaactagaatcaatggctgccaaacatcaaaagtacgaggtaaaaatccaatggtcttgtttctggcccactgtgggtatgcaacaggaaattcatgtgcgccttcactgctctttttctcagggacattctcccagcatgttagcaaggcccagttaaattcctcagggtgagggtccccttggagaagggagtgagttggtgtggatttctgtactcaaggtagagcacttccaataaccaggagctctgggcatcccgcccctgatctgggcaaatctggcatgaagtctacacactaaaaatagctttcccagcacaggaaagcaatggtagaggcttcctgatctggcttgcacaccacaggtgaagtaattggtcacttaccagtgtctccccacttagattccaaagtccactgtatcaatgacatcatgctaacaactggatgagcaagacatggcagagattttagaggcctttgaaagacataagcacttcagagagtggtagattaagcccacgaagattcagagaccttccatatcaatgaagtatttaaggggctactggtcaggggcatgctaggaccaaccctccaaagtcagaggcaaatgattgtatctcacacctcctacaactaagaaggaagcacaatgccatgtaggcctctttgggtctggaagcaggggaccaaggggtgaaatgaccccacttattatctctcctagtgatccacatgggaatttgtgcttcctgtccccacaatacagtcaccactagccaaattcatctatttaaatttaaattaagataaaattagttgttattttatctgaattttagataattaaaattcagttcttcagacacaccaggtacatttcaagtactcagtaggcacatgcagctagtggctaccttattgaacagtggatcctggctattcaaatggaaatgcttccaccagtagacacagtaggagccccactgaattacgagccatggctgataactgaattacaagtcatgggaaccttgggttcattcctcctgctatggctgtgggactaagcaggtgtaaagaagagtagccactctgtcaggggtattggctctgatcatcaggaggaggcagggttgttcttacacactgtgaacagagaaggatatatttggcacccaggtgatccatttgaatgtctcctaataattccctgcccaatttttatggtaaatggacacatgcaatttccacagtctgagaagggcacggggaccatgggctcagaaacaatcctcagggataaaggtctgttactcgaccagccaggtcactgagaacggcagacatggtggctgagactgagggtactctagaatggatagtagatgaagaagaccatgagcatcagttgtggcttcaaagccagctgcagtcatgcaggccatacactgtcccactaccctgcctcatgttcacctccctaggaaaagggccaagccaaaccctggagaagttattcccaaatgaggggagcatcctgtgtgaagcaagcccatctgaggcctgcaaggcatgggctgtagtcgatgctgtggtcgttccacagcccagcccaatggcggaggtcatcattccactgcctgccaaaggtgttgcttgatgatggcacataactaagtctctctccaaatatcagtcaaggggtcaatgaagggtggagagtaccaacacctggactccagcctctacttgcaacatctctatagaatcttcccaaccatagagctccctcagggactgactgagacgtctgattcaactgtcataaaacaactccactttcctcccaattctacttccctcactctattacaggtggtttctttttttttctttttttttctttttgaaatggagtttcactcttgttgcccaggctggagtgcaatggcgcagtctcggctcaccacaacctccacctcccgggttcaagcggttctcctgcctcagcctcttgagtagctgggattacaggcatgcaccaccacacccagctaattttgtatttttagtagagatggggtttctccatgttgatcaggctggcctcgaactcctgatctcaagtgatccacctgcctcagcctcccaaagtgctgggattacaggcatgagccactgtggctggctacaggtgttattttccaaagcacatgtcctatcctttcaagttgcagggatgaactagtgaaggccccaaacattgaccaactggcatcccacagcctcctcttccagaatgcctttgcgcaggtatgtctgggaacctctagctgtgggtgtgtgctgcttcgtgcactgagggttgggggcggggagcttcagctactgtcagatggcacagattgtgcgggacatcttgttagagggaagcatagtctggaaaatggtagtggagaaaatctggttttccactcatgggaaagcttgaccttcaagggtggccttctccttgggtgcaaggtgcgccctggccctgatgtgttcatggcagccctggccagctttctcccagaacgggcgcttgcctggtgctcagaaggaaggggtgctgcagaagggcacccacaggtctgcagactgggcctcaggtgagagctagccagggtggctctgctccctggaccccctcatggctctgcccccagcaacactggccactctgtgtgcctggggaggccattgcgtaggaggagataagcaactgctggtttcaggggctgattgcttcccttttctctcccggaagcagtctgttgcctaggtgacacccaaatcccagtgtctggtttgagctctgcatgactcagctaccaagctgtttgctaggggcctcgggagggcggttgcttggttacctaagagatggcagacatgttttgctgtggcgatgcttacctctgcttctgctccctaacagcaagcagtgtgcgccccgagccgcgtttctttcctcactggcaggagacctgacaccacccgcctgtacgacttcaactcctactggagggtgcacgctggaaacttctccaccatcccccagtacttcaaggagaatggctatgtgaccatgtcggtgggaaaagtctttcaccctggtactgctccacgtccagagtctgggttctcttggtttgtggtgtctgaatccagcattcccatcctggggatggggctgtctttgcagagccctcttctggctgggcgagtccttcgctagtcagtgcttcctttctaaaaaaccgacttgtcaacccagccacatgttttcacccaaagtgaaaaagggtagaaagaactttgcttcctttcagaaaccactgagggtgtgctgttgggtccttcagctcctcgggtggtagggaggacacaggctggggaggtggcagtgttgggtggagtccagctcagggccccaccctctcccctgcagggtacctgtcagtaaacctaggggtggggtgaggacacctgagggcctcccgtgtggccagcattgctgttgctgacttattgcccagtgagggggctgtgcttaggtgggggctgctatccactctgtgaattaggtcagaaagatgagtgtaatctggtttctgcacctggtctcagaagctcccaggtctgggaatgggaaagcgcacttcaacaggtgtctcaggtggtctggccacctctctttgagttcatccttcccttggcctacctgtgctgccacatcctcatcttgggcctctggggcagaagctagaaacctctgggcatgggatttaacaggctgcctgagctggctgtcaaggtcactgggctcttgttcctcctgatctcaagatggatccttggggcccacacaggcatgcgttctccttagccagacttccccgtatttgctcctggctgcagcagcacaggctgaggcccggcaccagatgttcaatacgatcttgcagtcaggcggtccacagctatttctgtagcatttgccatgtgtcagaccctgtgccaggcctgggggccccctctgcctggtgcagggcagctcacaaaagctggcagaggccgaaggctgcgtgccagtattcagaatgccacagagcgcctggctgctgtaccttcagagcctccacaggcaccccagtcagagttccgggagtggattcctgaggtcgcactgccggggtccctcactttgccatcctgcaggcttctcgatcctcgaccttttagattcccgccacactgaatctaaaagggacaatgtgacctctaagctggtggcctaggagcctgccgataacctacccattcatcagccctcgtgggtcaaggctgcctcgtcctccccgagagagtggagaggtcgagcagtggggatgcccctcaggccccggggcttactgactggggcgggtgtcagggggaactccctctctttctgagcttcactgagctatctgaaagtccccaccatactccccagtactgacagccagagggaggaacggctcaccagaatcattgggcatctctgatgggcatcaagtctgctttgattattgatgagtgggtaagagggtcctctcaacttggggtctccttaggaaagcactgtcaactcagaacaggtttcagccctgttctggagaccacaggccctggaaggctgggacatcatttgcagccccagcgtcatctattagacggagccagcaaggtctcatgctgtgcggtacatttcaacactttctcaaatttacccgtggcagcttttggtgtgtttggttatttttataacactactcactgtacaatttctgtcatgcacattttttgtatcaaaaagggtgctgtaactttaaaagactgggtatttccaacttggaatattcaaaccatcttttgcaagggatgttttaaatcaacatgaagggttgtgttgtttttaatcagggttaaggatctggaatcaaaggttatggtttactccatctatggcgtatcttaaaaactgagcaagatgtccttgccttttttgaatttgatgattgtgctgcagttccacagctcactgttaggtggcacataccccaaactgaaaacctgagcttggaggaaatgagtgaaaagataggtaggtacaggacagggcagtggtgacactacagcattcagggttcccagcctgtcaagaatgagcatgtcttagcagtgaggcatttccacatcttctcaaatccacctgtggcagtttttggtgtctttggttatttttataaccctaaatatttatatacaatttatatacatgtacaaaagggacatgtacattatatattttgatacaaaatatgcacaagtacatattttgtatcaaaaaaaggttctcaggagaattccacttccattaagctggagtagacatacttttccctattcttccgactaagtgacctaaaaccccttgataatatacacaaaacaaacataagactctgaaaggtggagtgaaggcagatcagacggggaccttgtgacctgaggaacaatggagttaattagttctctggtgtgtgtctctctctctttctttctttccctctcctctcctttcccattcctcccttcccctctctttttctctttcttttcctctctttccccttccctctcttcctctctctctccctctcctctcctttccccttcctcccttcctctctctccctctctccctctcctcctctctttccctctcctcctctctttccctctcctctccccttcctcccttcctctctctctctctctctccctctcctcctctctctctttccctctcctctcctctcctttccccttcctccctccctctctctctaccctctttctttccctctcctctcctttccccttcctccctttctctcccgtcctctttctccctctctcttttctttctttgcccatatataccagacatggagctgaaggagctgggatctagaaatgtcaacaaacacagaggaaagaagaaagaaggaatgaaggaaaagagggaggaaagggggacgggaagggagggaggaaagaaggaccaaagccagaggaccaggaaagttgtgacttagcaagatagaaaacttttagacagtgagctgctttactctagttaacaccacagaaatatagtttgatccccacttccacacatgccagcaaaggccaactagggggctcagtgtaacatgcttgctaagctgtaacatccctcctgtctaccttggtgctgtcggaggtggccaattagggagctggcactttcatccctgccaggcaacagcaagtccccatcccctaaggtgtctgtgcaggtgatattggatacagtgctgaaaaatatcgaaccctcccagccacaaaggtatgagtacagccccagatcagatccaaaaagtccactcctgcccagcagaaacaaggagcccctcacccatttcagggatcaatggaggccatgtggcgaaggtagactactgcactcaccacgcagtaatgcagcgtgttccttccctttcttctgctggagtgatgtcagaggatgccagctaaaacaaagtttaaataacaccttcaacctactaacataatatgaaaatctctagatttcaatcaaaagttacacatcatacccagaaccaggaagatctcaaatggaatgacaggatacaatcaagagatgtcaacactgatgacaaagatgttagaattatctgtaaaaaaattgaaagccaccattatatgcttcattaagcaattaagaacgcatttgaaacaaactaaaaatagaaagtctcagccaaaaaaaaaataaataaatagaagacataatgaagaaccaaatggaaattttagaactgaaaaataccataactgaaattttaaaaactctataaaggaatcactggcagaatagacagaacagaggaaagaaccagtgaacttgaagacagaacagaaatttcccattctgaaaaatgaatagaaaatgcatgggaaaacaagatggacagagctttagggacctgtgggactatgaacaatgatctcacatctgtgtcataagggttccaggggagatgggaaaaagtgtggggctgaaaaatcaaagaagcaatggctgaaaatttcccaaatttgacaaaagacataactctgcagacttcagaagctgaacgaatcccaaagagaataaatccaaagaaattccacactaaaacacttgagttaaacttctgagaactattaaataaaaacaaaaaaaaattaactgagcatggtagctcatatctgtagccctagctacctgggaggctgaggtgggaggattgcttgagcccaaaagttcaaggttacagtcagctatgattgcaatgctgctctgcagccagggcaatgaagggagaccctgtctttaaaataataataataatgataatcattaaaaaaaaaaaaaaatcttggaagcaatgcgagagaaatgacaccttaccaaaccatggataccaaaaggaagtggcacaacttttttcaagggcttacagaaaatagctttcacctgggtgcagcggctcacacctgtaatcccagcactttgggaggccaaggcaggcggatcacctgaggtgaggagttcaagaccagactgaccaacatggtgaaaccctgtctctactaaaaatacaaaaattagccatgcgtggtggcatgcatgcacctgtaatcccagctacttgggaggctgaggcaggagaattgcttgaactcaggaggcaaaggttgcagtgagcagagattgccccattgcactacagcctgggccacagagtgagactctgtctcaaaaaaaaaaaaaaaactttcaactcagaatcttacatcctgtgaaagcatccctccaaaatgacattccatggccacataggtttgaaaaccatgttctagactaaccagttcattttctagatagcacaactgagattattcaaagaacatacaggatttttccaagatcacattgcagtcccttgaacactgttggaaatctctgaaatttgcaaagctgagagaccaaaaaaaaaaaaaaatctttcatcagtgttgctggaataatctccaacctgtaaatgtagaagcaaatcttgagaacctgagtcccagaaagagacaacacaaggtgcaagggtatgtcccagcaacagccctgtgacatgagtggcatttgtacctcctggtttataggagtggaggagacacagagagacgagtaaccaacaaggtcacacaggaagacaaagagctaacattcaaacccaggtctgctagacaccaaagctcaggctctgggcctcattgttacatacctcatggccattctcagcctttctgtgtgtctctatgcattgctccagcatatgaactacaaggacccagaggatgcaaacaatgggctcctatgtcaatgcctgggctgacccatacaggccatttgtaaagaaaatgcaaacagtgttgccatgttttcatggtaccaagcattaggaatttgggtttgttttaacatccattgttctatatctgaaatctgatgtaaaatgccttgggaaagttagaaagatgaagaaggcaggaatggttagaggagggaaaggacagaggaaatagtttacaatgtatggacatattcgtcttagcacctcaaacttacactcacatcccccaagaactacacagaactttctgccatggaagccactcactgatcatgactctcatcacagcccacctttaattaaaagtgaagctgtatgagtcagccagcagatggcaaaatgaggaaccaaggaacatatgactaaggtcaaacattagctggtgtcatttcataaatgaagtgggcctctttcctaaagctttttccaagtatcatctgcaaatgttccagttgggtgctacaacatgcagaggccaccctgtctcatcgtcttgtcttcaccacccacccttctctttcaaaggcagtatgatcagacacagtagacggggggcctatcctaccaaatcccacctggccctggatgctgcagcttagggcatccaagagcccaccagggcaagcctgcactgtaccttctttctctgggttgtcagtggcaggccactctgctcaggcctgccaagtgagggtggtacactgggcaaatcaactttctggtagaagcacaggaacatctggccccaacactcttctctccctctgcctaccccacagtaatcctcagaacctagagacctaatgacaactctccaaacttcattctaaagtcaggaacaagaattggaaacctcatcacaagtcagaagattgagacatgcttaaggttactacctatgtgttcagattagcaaggacaggagcacactgtaggtaccaaccgcttatccatggaaggctgctcctgagctgcactgggctgcatgttatatttgtgtgcctgttgtctacaaacactcctatcccatcagaagtacacaagggtttgtcagatgacttactggccacgagtgaatcaatgaattcttctcaggaagagaaccagtttgccttttaaaaatgctgacagtgaaacccaagtgaggaaactcacctgctgcacccagcgtgcagcccacactccttcagtggtcctttaggagttggaaccaatctagtttcccagcctcttctcccatgacttcactctacgaatgcgtctgctccagccacgaaccttctctgggctcctcgaatgtacctaaccctttcaggctgtccttcccccatttcccacctaacaaaacccttttgaccttcaaggcccagctcaaacaccccctcctctacgaagcctcccccagccccctgcccagagtgagcagttccttcctcttcacattcacctaactcctcttgcctgtaagatgcccccttacaagtaacaaagacatgagtgtgcacctaccttcaaggagcctctttcaggagggggcctggcttccatctgctttctgacatactttgcatggagatctgccctctcctgccaggctgtgctcacaccaataccaagagatcacgagacgccctgccagcaaatgccctggaagcacatccccttcatgcccctggcagtcatctaatgtacacacaagatcaaagcagctctcaggtggcctgttgcagggcacagcacagttctgcctatgccaaggcagatgctgggcccttccctattgtgttcagcacgcacccattctccagggcaccttttctgagcattaatttatccagtcagttaatatggattgcacagcctgctatatgccaggtaccatgtggaccccatcacccgtacccaatgcaggcccctctagtgggcaacccttgctccacacctccctgttgggctgctcgagactgtcaggtcgggctcaacctgctctccagccctgtttccttcctatccctttcctgagtgttagttagccccagtaaatctttggccctgccaactccctctcatggtctgcttcctggaggacacaatctgagacagtgggttccagagtggtctgagaaagcaggtggtaaaatggggtcttggtacaggattgccccgcatctgcccaactggcaacaaggttcccatcttcgggagtaggtggcacgcaggcggctccaggcacaagatggcaggctagttgccagacctttggtgttagaacttttgctgggatggccggcttgtggagaggaagttcctggcaggtgaggagatccaggcagggcggatgcctggaaatgaaaactcagagaacagacagtggtgagtatatttcctggatgacccacaggggattaatgagaggccaagagcaattaacaaacatctaaaaattaagcagaaacactggagtcttcctggtggtttacaaagtagcccccgatccaggcaatgggcgagcagcaaaatctgaaggacaaacccaggacttgctaaggtggctgaactccgaagacgggtgaacgctcagccaaggcaggtctgtcatgccaatgacaccagccctgttgggaaaacctgtgtccctgatacatggaacaggcacatctaggagaaggtctctgaatatctggtctccccagatgcccttgaaacttctgagcccgcagcatcagcccaccccctcccatgaagcgctgcaggcaccctatcccgaaggagaaataaataacacaagaattttccccacaggtgtcctccctcccaggagtggccctcaccttatcactggctgccaggtagggtgaccaacagtcccagtttgctgagtgaattgcagtgctaaaagccggcgagtcccagggaagcaggacgaattggtgagccgactgccagacccgtgaccagagtgaaggtgcagcgcagcgccatgcaggcagggtgtgctgggtctgggaagggggaaagcgatgacaccctcgaggagctgcaggatcagcatgcacctgcagcggccagggggggtccctgtgggatgggacccggatgcagctcaaccagtggggacttggaggcactctgctgctcaacacaactgaatgccctggtagggagccgaagggatggggcaaacctgttgatggcatgggatgggcaacagtgatggtccaggcctgagtgacagtgaaaggcccgaattgtcacagcagacagtgaaggaagggattcaaaggctaagcaaagtgagcttgctggaactggacagaagaggtgaggccagaagacaccccggaggatcaggtttcaggagaggacccagaggacacatgtgtcagcaagggcatcaggaatgtgctgcagagagggcgccagcatccttcagagatccagcgcgggaatcctctgcaggccagggctgaccacaggagagtgtcttgcagaacggggcgcaccgagaactggaacctgataagggtgatgcagcttcgtcctcctcctcgtttccttctcctcctctcctcccctcttcctcctctcctaattctctcttcctcctctccatctgctgtccttctttcttcttcctcctcatttcctcctcttactctcctcctcctcccacctcctgctctccttctcctctcctcctcctcatcctctcctctctctctcctcttctctcttcttcctacttttctccttctcatttccttctctcttcctctcctccttctcttctctcttccacctcctccaactctgttcctcctcctctcctcttcactcctcctccaccccctcctccttttcctctgctcctcttattccactcttcctcttcctcctttcctcctcctcctctcctaaatggtcctcctttcttcagcctcctcctctctgctttctcctcttctccgccttctcctttcttcctccacctctcctcttcctccaaatctcctccccttcctctccttctcctcctcctctgctcctcctctcgtcctgtcctcctcctcctacacctctcctttcctccctcctatttctctccttctcccttcctccccgtcctcccccctcctctcctcctcttttctctcactcctcctcttctccatctcctgttttctcttcctcctcccccctaatccctctcctctccttttctcctcctctttctcatttcctcctctcctcgacctcctctcctcatctgcctctccttctccttctgtccttctcctctcctcctactcccccctcctcctccttacttgctcttctagtcctcttcctcttcttccttctttgctgctcctcctcctcttctccgtctcctcctctcctctttcttctcttttctgtgtcctcctctcttccttcacctcttgtccttggtctcatctcctcctcctctccttctcctcctccttccctcctccaacccactccctctcctccccctccccctccttttttcttccctcctcctcccttccagctcctattcctccactttacctctctcctcctgctacaccacacgttcacatgaccctgtgtgagtccagggcagaaaagtaaagctaaaaggcggacaaatgaatgcaagagagcaaaaaagggaaccctctctaatctaatgggcagggcactggacacatgcgagcacctcctctgtgggagaggggtcactgcctccagatggaggggcagtgggacactccatgacctctggggttacttacaatttggagtgcttaagtgaatactgacttcaaaacagccctgcaaaagatgtaagaacaagcccctgagcagacgaggtctctgaaatacaaaaagccaacatggggttagaggcagaattcagaaagagctcctacaactccatatcaacaaggcaagtgactcaatagaaaaatgagcaaaagccatttcctagacgaggaaagcaggctgaccaaaaagcatctgaagggaaaccatgaatcagggtcaaagcggtcccagactggccgtgccccggaacactaggcaggatcaaacgtgaaccatctccagagaagggcaacttcctcctgggcctcagagtcaaaaaagcacagtgaggagaggtggctgcactctggaaagtgtcagtggggaggcaaaggaagaggaaggcggtgacaggctcagaaaacaggaggagttgcacggaaattaggctgagcaaaaagaatgcttctctaggggagcatgtgggcagaagagaaggactgcacagccggggatgctgagcacggagaggcaaggtgatggcaaattcgcaagggacagctctagccagggaggctagcctgccatggagggagaggacagagcaggagagggcagggttgggggcagggggtgggggggcagggtagggtagggaagggaagcggggagagggaaggggaggggaggggaagggatgggaggggaaggaaggggaggtgaggctcagaaggccaccgggatggactgggagctctgcagggggctccctggtgatgaggaaggaaggaagacctgagcgggggctgtggtttcaggaaggaggcagtatcctgggggaggcaggcagagggtacagtcagctgcaaagcaggatctttggaaaaggcaaggacttcctaaaagagatatgatgtgtggcacgataggcatgcaagcaaggcctgaagaagcaagcagaacttgaggagacacaccgctggccccaggagtgggggtcagttcagtgtgtgctactggggtgcagccaggcacagtggtttcaagggagcacagcaaggaacccaagaaggccccgcatgtctgcagttggctgactattgcccgggactccagagcatccatggagggccccacaggggaaggcaggagcaggacgggtctagggaggtgaaggccgacctgacctgctaagagacgagaagagagggaggggaaagtcttgttcctgccaggacattgttaatgagaggagtgagaaggcagcaggtgaagagagtgtagcatggaaggcagaaatcagagcgtttttgggtttcgtgctgacctgctattgggaatgaaaatcaagactcaggtgcattctggtccctttctcagggttagccgaacaccacccgcatccctgcctggcctgttgatgccattcttcctaggcccactcaccgctgcagctgctttacttgcacttcctctcctcatccgaccacagatcagacctctgcttctcgctgccgcccagggagagtgtgcacctacgtgcacattgcaccccactgcccagcacacccaggagtgagagtgaggagcagctgagagagttggaaaagggagcccttatgtggccaccaagggcttccctgctagcagccacacggtggctatccagctcattatgcgagttctagttcttcaaacaagaggccacgggaggagcaacggccacccaccatcccggggatcctcattcatgatttgaaaccactctaagcaggttctggggtgttcggcagaagctggcaaccattcttgtggggaaggaacccaggaggggatgctagcatgcataggaattggaactggtgatctgaaggtcccctgcagccctacggcctacatcccataaagagggaccctctcctcctcacctcatctccagcattcctgcttcctcgagcttctccagggagaagtaggcgcatctcactagaaaaaacaagaaagcagccctttgctcattcaacacttactaagcagatactgtgccctgggcacccagtttcagaaatgagtaaaacaccggccttgccttcaaggaactcaagagaccctgcggcagccacagtcttacagagcaattaccaccctgggttgcaagagcctaacgtggggtggggacgggggaggtacaaaatgctatcagagctggagacgaaagtctctaatactcggagtggggctgtgaaggtgactttaaagttgtgccttgaaggaggccaggagcgcaccaggacaaggccatgggaaccgccggtgcaaagcagggagacctggaacagcaggctggtggggaccagtgactgaacagcacagcgtgaacccaaagagtgtttggcttaagggtggggagagctgagccgactccctgaactgctaggacttaaacctgagaaggcccagcagcgttttcactagaggattgctggggacagatttgtgacttagaaactgagccgatggaatgtggacgacagacctgagggaagaaagacagaggactccaggttgctcaggaggctcatggaacagtgcaggctccagaccacgaggcctgaattctggaagtagcagcggggatgcaggacgaggagccgttttgtctcatcaggcactccagaggcagggacccagaacttggttatgaagtcaatgcgggagactagataaggggagggacagaggagtaaagcatggcagcactacagaacctgagcccgtgactgagagaagagagtttgaaaagcaagtttgccagggaagttgggctgtgtgctgggcgacttaggtcggaggaggcaagacattaagagtggggatgtttctcatcacctgcaaaagagacgttaaagagacggttcctccggaccccactggcaggcactgacagagcggctaggacacaggagagcaggcctggggggctcagccctgcaagactcagcctagagctgcatagaccccagtcaagtgttcccgcccttcttgctgcttccgtgccctatgggggtagacactggaggtgcagttaggtcgctgcgggcaagttttgactcttgcctaagggtgcatcacagaagggcctcagctccctcccccagctccacccacagctccacccccagttcggctctgcttcatttcaccagcatctccacccccagctcctcctccggcagctccgccccagctgttccgcccccagctcttcctcctcccagcacttaaccagttccacccacagctctttcccacaactacgccctcctcttgcaggcggctcctccagaagctctaacccagttcctgctgcagctccacccccagcttcgtttcccacagccccaccctgctcaccctgcatctccagtcccagctccgcctcctctagccccgtcccgcttctcctacccctctgcccaccccagcacctttcagctctttcctccagctctgcactagctcctcccccaccattctcacccgccagccttactccagcttggctcccccttctccagcaatttcccgcagccccgccccatctgctcccacacctctttgccacagccccgccctgctcctcctccaggaacgcccggctttccctcagctccacgctgcagctgagctgtgcaccaggccctcccacagagctttctcgtgattccaccctacacctccccaagcccccgctcccctaagctggttctcaggagtccgaggggtcctcccgcagctgctcctcgctcagttctcccattgccccgccctgctcttcgcggggctgcttccaaagccccgacctcagccagcagtttctctcagccccgcccctccctgccccgcccctcccctccctgccccgccccgcttctcccgcggctgctcccaaagccccgccctcggccccctccccaggagtttctctcagccccgccccaccccgagccccgcccgcagccccgacctgcttctcctgtggctgcctccaaagccccgcccccaaaccttccccagcattctcagcccccccagagccccgcctctcccagccccgccctacttctcacgcagctgctttaaaaaccccgcccccagcccctcccagtgatttctttctccccctccctccttctctcagcggacacctgcctccccctgctgattctcaagagtccgcgagctcttcctgcagcttctcctcgctcagctctcccacggccctgcccacaatggtttctctcagccccgcccggccctgccccacaccccgcctcttatctcagccccgccctcaacccagcccccaattgtttctgtcagtcccgctcggcccctcccccagctccgccctcctcctctcagccccgcctccaccccctccccagcggtttctcccagctcctccctgctggtatagcagctctgggcccaaaactcctgcctggtgtcctcgtcccacccttccacttactcttcctccctcccgttccttttcctccttccggttcttcgtcgaggctgccggtctcgaggtcccctggccttggcctggttggctggcgcgcatcagggccaggtaaagagaatagcgtctcctagcagccagggcgtgcgtacgtgcgtgatgtcgtcagtgcgtgtcttcgagaatgcgagattcataatgtttgctgtctatatgcatggctgagtacgtgcctcccgcgtacgtgcgtggtgtgcatacatgcgtgattgcgcgcccacgtacgttcttcgtgaaagggatgacgggagctgtatgaaagcggaagagttatagaccgctaacacctgtcactggccactggtttcccggagttagcggcaacgaccttgcagcctggacactagccaggcgctccctcttctcacagcggcccacgtctccttgcttgggagcccatcgtcctggctccggtggcctcgctgggtctcggggaagcagaggactgttcattcctgtggcgaaaagccggagtcggccctagacacccacgactcgcagggtccatggttccggaggccgtgagacctgccggggctgacaggtgccagggcccatgctgcgggagcctgtgtgctcagccttcttgcggacggtacctgagggctggggtttccctggatgtggggctgggaactcgtgcggggcgcgaccgaggcgccttttcctgtcccctgctgtcggcagggtctcggctccgctccttctaagcgcgtgtacccgcgacgtgcgtctgcgagtagaaagcccgtgtactgctccacacacagcggccccacctcagtccggtcttccctgcctcccgttggcccttctgctgtgagctcgcctggacctgaggccgggcggtgcacagctctgtggcctgtggcgccgtgctcagcgtgacctacccagaattaagctgaggacaatgggatttagagtcccaaacactcgccccgtgacaatgggaggggaagtgtcatttttctcccttcgaatggagcatgcttggctgcaagaatgctgctcaacatggtgaaatgattttctgccctgcgggctggtgcaccctgtggtccttgacccagacaggtgcggagggtcccactgctgtgattagcagaaccaaactgtgatgtgcacatgtgtgttactgataagaccaggcctcccagctcttcttggtttccaatgcctgctaagtacatgaccttcttagggccattaaccagctttgctgtcttgcacttaatgacctttcctctttatcttccttgttgtgcaggtaaagaagctaagtggaagagtgtttcctcctctggccgtaaagcaggtactctctgcagcaccaggtaggaggggactcaacccccttcttgccttttcagttacatcagttcctactagggattccacatacacacagttggcgtctgttgtgattttgtggtgatgacgagaaaagggttggctaagaaactgggcggcagaaaagaggcaaacattcactgtagccatttatcccgatggaagtggccaggccctgtgggggacattcagcctccatcagaagtaatccagaaccaaggaacctggttatctttggtcactcatcagaagaataatcatgctcaggggccacaagtgtgtgaggaaatggcaccatggatgggttggtggagggtacacgggtgagtctttgtggaaagtcatttgctggcagatatcagcatcttagatgggcgtgccaggcggccgaggcatttccttcagcatgtcttcacacagcgagtgttagaggtaatgtcatttctagtggcaaaagtgggaagcaacttgtaactctccatcagtggaggaatggtcaggcaaattatgagacgaccaacaatgggatatcacccaggcagtgaaaaacaaggtagatgaagattgtcaggtggaaagaatgggcttgatgtgctgtcaaatggcaaactcgtgccctagcctgtgcagatgtgttgggaacagcagtttgccaagatggctgaaacaaaggaccataaaagggctggcttaaagaacagacaatcattgtctcgcagttctggaggatggaagtctgaaatcaaagtggtggccaggttcgtttgttctgtgggctgtgaaagacaatctggtctgtccctttctcttagctgcaggcggctggccggcaatctttggcactcattagcttgtagaagcatctcccttatctctgcgtttatcttctcatggtgttctccctgtgtgcgtgactgtctctcaaatcccccttttcataaggacgccagccacattggatgcgggtccgccctgatggcttcagtctcacttgattgcctctgtaatgactctgtttttatatataaggccacattttgaggtgctggggtttaggacttcaacatacgcattttaagaggacacaatgcaacccatcacaactgacaaaggctctgaggtagaaacaagcttggcatgttccctcaggggatggaaggcctgtgtggcttcagggtggtgaataaaggggagaggagaggacgtggctggggtgggaaaccagatcaggagggaccttgagtgccctgagaggaagtgtggattctgtgctagttggggcagggagcccttgaaaagtttcagtagaggagtgacataatctcattgtccctgtaccaagatcattccgatggcagtgtggtcacaagagtgcagaggacaagtgctgggggggggtgggggtgctatcaggagacttcttcagaaggcagggggttttaggggattggattgggattgtggccatagagattatggaaagggatcagattcaatgtcggttttggacacagtgccacgggatgtgggccgcagatgtgggaaagaaaggcagggcagagagcagctaggtctggggcaggaacgctgtagctggtgatgccactcacagaggtggaagggaggtggacttggtggtgatggttggggtcctgagtatgtacgggcctgtccacctaaggctgagtctgaaggggggtggcctgcaccacgggattcagagcaggacggtgagcaacgtgggggtcccagaaggagggaaggagtgttcccagccatgctggggctgctgagcatggactaagatgaagacaggactggcatgaggccggccatgggtgcttgtggggataggtcagtcagtggagtgggtggtggggggggtggggaataaagggagaaaggtgggggtgggggcagaaggttcagagaggaagtagagactgcgcatgtagacagctcttctgaggtctcggctgttcagggttgtagagaagggaggcagagtgggaggcgcgcgtgtgctcagagtagggatgctgagcgagcatagatggtggctggtggcacccagggcccggagtgagccagaggagcagggtccagagcacagcaggcaaccggctcagctgaggcagctcaccccagaggcgggagaaaagcaggagatctggagctcagaaggctgcagtgcagactgggaaaggagtgaataccaggcagctttggccctatcagggctttgtctcatgagggtgggtatattttcttaaaatcatagagcgtactagaggttgcgtttatgtgttgaaaggaaggacagagagaggagtaggggcagctcaagggtggagttcagggccgggggcggggccacgggcctgaggggtgagggcagccactatttctgactgttctattaggtgccacgtactgggctgggtgctcttggtgccttatctcccttcctcacagccatgtggaaactgaggcatctcaagagtctatgactgggctgaggttctggtttcgagcccagggttccttccaaggcacagggccgtcctccatgcaagaggaggggaccctctcccaagccagacacgcaggaggctgggcaagagttgtgggaagtcagagcccgtgtgactgtgggctggtgcctcattctcctcagccatagagtgggcctcacagtaccactgaccctgctgggttacttgaagattcaatttgatgatccgaggatcatgccatcccagaggctggcacgtggaaggcatgtgtgtggggttgctagttgttctgattatcattcttcttttctcagctcagattgggacaggggcatctgctgacagtggagagcagtggtgggggaaggggcttgaggaaggtggcacccagaggggtggagaggagatgtctgactgagggccatctgaggtcacggtgcatcctgaggacagagctgagattggatatcaacgatgtgggctcagcagccctggagtaggagctgggaaggtcagtgccttggtggcggcagggccagggcactgagagtattggcagggcacagcaggggaaagggaagagaagcagagggtgggactctccctctgtgctggaagagggctaacaccagcccggactctccactctggctaggccaagggggccctctgtcctctgtgttgccctagggctcggtgacctctgtcatagcactgaccacatggtatcctgcctgtgccttcctctagctgtccccgccctactccggaccgccccaaagactccatgggatggacctgagtcagccgaatcccagccccttcccttgggcctgctgtggtgctggacatcagtgacagacggaagcaggagaccatcaaggtcagtgcgatttaggccacctgagagacacggggggaaggtcaggccactgcccatgagcttggagggctggcgtgtgatgcgcttctgtgcttccgcaggctacgggaggcccggggcgcttgcgaagatgaagtttggctgcctctccttccggcagccttatgctggctttgtcttaaatggaatcaagactgtggagacgcgctggcgtcccctgctgagcagccagcggaactgtaccatcgccgtccacattgctcacagggactgggaaggcgatgcctggcgggagctgctggtggagagactcgggatgactcctgctcagattcaggccttgctcaggaaaggggaaaagtttggtcgaggagtgatagcgggtaagtgacaatgtaccaaatgcgcagacaacgcctagggctgctgcccaagatcttgcttgggaatttgggggcttctcttgtcatctgaactgattggcgtgtataacacagtttcctttggcaacacaccttcaaaggggcggcaaggaccttgggctgggggttggtatggctggcttccacgagttctggtaaatcatttctccactctgggcctcagttcctgtttctgatctcagtgagaagcctggtcagggccatgtgcacatggtgtttgtggtgtttggctgtgtgtatttgcacatacatgtgtgagtgcacatgtgtggcagagaccatgaaaagcagcccagcccgccgaatgggtcaggtggcctctagagttgggctgcccgcctggcttcatgaacctgccccagccccaccactcacagcaccctgggaaagtcccctaacctctaggtgactgaggcccgacatcagcatctgtcccctggtgacctgctcaggcatcacctgtagcttcccaggcagtggctggtgcccttccaatctgcaaccgctgccctcagaagtctggcttggacctgcctcttacttgtgtggcttcatgaggacaaggccctctcctctgcctttctggagccctccccctgcctctcccagcgtttcctgaatcgggtttggttcgttatcaaagctacggaagaaggacttgactcccttcttgtcattttgctgatgctgtcttactctctattgattgtgactttgagtaactgtgttgtcacatgggcaggccttgggctatggaagtgaaaggcattcatgtgtatctctctttgtgtacaggactcgttgacattggggaaactttgcaatgccccgaagacttaactcccgatgaggttgtggaactagaaaatcaagctgtactgaccaacctgaagcagaagtacctgactgtgatttcaaaccccaggtggttactggagcccatacctaggaaaggaggcaaggatgtattccaggtagacatcccagagcacctgatccctttggggcatgaagtgtgacaagtgtgggctcctgaaaggaatgttccagagaaaccagctaaatcatgacaccttcaatttgccatcatgacgcagacctgtatacattaggttaaatctgaatttccactgctttggagagtcccacccactaagcactgtgcatgtaaacaggttcctttgctcagatgaaggaagtagggggtggggctttccttgtgtgatgcctccttaggcacacaggcaatgtctcaagtactttgaccttagggtagaaggcaaagctgccagtaaatgtctcagcattgctgctaattttggtcctgctagtttctggattgtacaaataaatgtgttgtagatgactggttagtgtttgaggctttgttctatgttttcccctgatttgttctggtcaaaactcatcaaatgtgtaactagcatccaggcgacaatacagaaagtctgggacctggcactgaatgtttgcctggtagtgactagccgttaatcaaccgactcatccaggatgaagaggacgtcagacttagagcagctgtctgtcctttcaggttactctcactcttctgaaagtgtctgtcagtttctgaagcatgtgtgttacctgcatcacacagctacttcctatcctagcaatacatccaaaatacagctctagtagagtgaggttaacttggaaatgtgatcagtagtgttgttttattttgtagtaatttttttttttttttggtgatttagcaaagtttctagttgttatccatgaggatgatgggcatttccccccaggtattgactgcagtggcccttctcttctgagccaggatgttatggtggttgtacatcccatggcagatggggtggcctgactttcaagtgggcctctttggaggcccctggatgctaggctagggatgctgagctgctgaccagacacttcctggcaacattgggagggacccatgaggaaacaatctcctgtttgaagatacaggaagatattgccggaatcaggcgtctattctttctcctgaccagcaggccaatctcaggggaccaggtcttcctgggcttggcctcgacacttcctagcaacatcctttgctgagtgtgtgaaaatgctgcttctccaaataaacgaggacaatggggaccaaagcctgtcttggacaggatttccagcctcccctggtttctgccaatgagatgtatataatatacaaggttaaaaaaaacacagacaacagttctcatttaaattgtttattatttatttccatggaattttgtttttctttattaagaccaaaaatgtgtttctcattaaaaaatggcaacttttatgggccattagtggcctgtgacttcacgaatttgcagtgtttctgaactgttcacagagtctacacttgtaatctgaggagccttcctactcctcctcatcgtcagagggctcatttggagacatgactgagagggaggccaacagagcatagtaacagatattgtacaaagacattacactaccattatctgagtaaaccagactactaagaatccctgtgccttccatccaggtagtagccgaagatgtaaatgtgacattcccagaggtgccctcccaacttgggccatttggttcctgagggggcccatttcccaggggatgcctagtggcactcttcttggaccacatgccagagcgcctgaaggactgggtgccactgggcccctgaacactgggggctccctgctgacacattttgattgcttctttcctggcattgatgtgatagatacgtagggagcgtcttgtagctaccagattctttctctttggagttgggacacgggtcgcttgctgagcggtgtttctgagggcatcctttctctggatattctccaggagcctgggcttgtctctctgaaaattggagttgcagtagatctgaaacaaaatgaaacatgttagttgttctgggataaattattcctttcccacctctcaaaattatgattttgttttgcaatggagaaaagaatgctttaagtggcagcaagtgtggttatgctctacagcatgacctgactaaagataaacaattcatagatcaaggcagtaatatataaacagcatggattttgatattaaactgcaaccccgtagaggtaatatgcaggtctgcaaaatatgatgcttacattatctctaagggggttgtagtttaatatcaaaatccatactttttaagttctatacttttcatctttcaataaacaatatttcacattttcaaatgctatccttgacacttaagctcttacagtatattattcaaattggtgtcctatgaagatatgtttgagaaagagagaaaagggattacagaaatgctttctactttaccatcattttcttgtttcctggagagttgcttgggcgtgttttgcagaatccatagaggttcagctggcgaatgaaactcgtcaagctgtctgttttgaagatcctctctgcacctttccgttgaagaacctccctctggaagagatccttgtcgatgatcacggcgtctccatcatcgttccagctcacagacttgaatgtgtcttcctccacaatcgtccaaagctttcttgggaaggagagcctaaaaaggttgtggttgtcttccacgttgaccacgcgttggtttcggtcttctggtggtgagttatcttgggagcctggatcttggctcatggcttggtcctcgtgcctgtccaaaacctcgctggaatctggatttggatcaggtgaagaaccagatgggcccccgcttgttggctctccaccaacagatggggccagcttggcttcatattcctgttcagtgttctgactcgccatggagctacaccagaatcaggagcattttgtacccaaggcccttatcactgtcctagcaagtccaaaatgccttcagtcagagtaggcgtgcccaataaatactgtccacaaaattctagagtctcggtatcagggcaaccagtggcttaactcatcatctgctgtatttgtcgcatgatgtcacaaaggtggctctcagccaatctggagagggggccctggccaggtgttgggggagtagacaggtggcatggccttcagcttctccctcttctaaaagtataaacaggcatggttcaagttcccagaaaagtctcccatcttctgacagtcacattgtgtcaaagggccaggccccagatgagctgagaaaccatggctctatggccactcccaaccctgaagacaggggaggccatttgctggcctctaatttgctcaagagccagcccctagttatccctagcttgggtttcaccaagactgcctgactcagatggacccctcatgggtgactgccttctaggagatggtggtccctaccaggctgtttggcctgatctgtgtggtagcacccctcttttccaatccccccatctcctttctgctttggtctcttccaggtactcctaatgattggttgcatgtgctccagtgggcccagataaagtgtttcttattccccttggtcaagttgtccccagagtggtgctgtgcctgagcatggtgggagcactcccctcactcgtctaccactgtgttacccagagcaccatttgtggttggatggccacatcctcagctgtgctttggagtctcctgtggagctctgcttgcccttgcatctcaccctcttgcagatcacaacaggagattacctttagtttcatttttgcccataaatactgttttcattgcccaagacatgttcatttctgaggcctgctttacacagactagcctaagaaaagtttctgcttgtctagttagacctgactaaagtaatccagcacaaaagttccatcattatgtatttgaaaacagatgagcgtatgagtgtgtgttgcggtgggcaggaggagggagaaaacccaaatgaaagccatgttcaaccccagatgagaggatacaacagtctttctggtgatacattttctctagccattaaagacaactttgttcttaatattcactctgtatagggagacagagtgatacagtggaaaggcaccagactgaaaggaccctgggtccttgtcccactgagtagcaccctttgcccactcagggtcggccctgagtgcgaagagggttggaagaggctcttccaaggtgcttttcaatctcagggctctctaatccttcatggtgcccccaatgcctggatgcaggcttggttcatggtcaccaagctttttaaacaggtttacaaaggttttgttcaaggactcagtgtaacctgtagacacacacactctgaggctaaatattaaaatagaggccattggtgagatctctaaatgaggatccttgagtattcagttagacagctggtatctttcacttacataccaaagtgctttttcataggggaattcttaagactgagaatgacattttgttgtggcttttgcgaacttataaactctgctgattacttatataaaggcttttggccattgggtgggaggggaattatcatgaagaaaattactagggaaactacacggtggcattcagccaagagctggtattgatttgatttagtcacactatgtcatgtggcttctataggaccattagcgaccattgtcctttgttttaagtcacagaatgtacactgggatttcgagtctaagacatcaagctcctcttgtcccctggagggaatattcagggcactgacttaagtctagtcaagaagagtcatggtgggaaatccagcctcctctggctaagcctgctcagtccccaaagatgagctctgcaactttcagcaaccattcagacattctttatgagtcacctgccacctgcaagccactttgaggaaaatggttggtcttctcttccatgctccaaaagcccctgagatggcccctctgcgttgctgcattatgaataaaatcatcatggtcaggcgacccaagcagagcacagctgactatggtatgaggaccagtggccctgtggaaagcggtctcagtgctgactcgctgcagcttctttgtagctatgcagcaatcaagaatagtgctgagctcttgatggtggggccccaaggtatgaggccagccacaggccaagacttgctgtgtaggccttgcctgtcacatgatccgccaggccctcttcatcctccccgtggcctctcaggatcttcttccctgctgatctctcccaggctccaggatgtgtccctgcagttggttcatcccaccccagaggagtctttctaaactgtggctcggaacttgtcagttgcttaggcaccacctcctcacacttccaaggccttcctttcccagcctcgttagccactgggctgctctttctcacacactcaggtatccgccatgccacctgcccttaaccctccttcactcagcatttgcttgatgctgggtcctgggtaagacaactctcaacctattgcaggatctggccagcagtctgcaatgcaacggtgctctctctttgttcccaggcagatcggcaggtcgagaaataatagacacacgcaagatagcaaaatctgggtccaggggggtcaccgccttctgctcccacggtgccaacaacgcactggatataccggcatttattattaagtttggtgagagggcaggggaaggttagtgagggatttagggtcatttgattatgaggtgagatggtcacatggggatgaagtaattctttaacataacatctgtatgcagaagtacagtatacagggataagatttatgatatagtgtgtgcatcagtagtttctaacagagccttaaaacagaaacacagtctttccatgacctatgattagcaagatattaatcagcagtaacagttgcagcaaaagctggttacaaacaatccatagaaacaggatgtgaagctagacaaccggttagaccagaaattctcagaagggagtatgccttaaccctaaagaggcctagaagagccgtggcaagatgagggcgtttatagccctatcttatccatatggacaggtgctcctcatgcatccgtttataggctctccacaagggtcacattccattcccagagctatgaacatctgcttttctaggataggaatcttggtgatgtgaaacctccctgactgcacgtccattcataggctctctgcaggggaaagcacatcacgtgctgttggctcattctggcagtccaacctggcattgtctttacacaatcctgcatgcaattatgtatttacaataatcaggagcatttcatcttttattccatagcaatagtttcagggggtctccctacatcaacctctggttccctctggtgctgttttctgagcacactgtgaacttccttgctggtaagggtgcttgtgctgcctcccctatgggaatgcccttttcaacccagcagtcactcagcttgtcagggtccaggtcactccatgaggtcagctggcaaggcttattcccaggggctggcccagcacagctctccaccattggttgggtggatcctgaactcctatgaggttgggcatgttgatgagccatctcccctctggactaagaggcccatgaggatggcggagaccacagtgcaaatgtggccctcaatacatgttggatgaggcaagttctatgtcaccaggagctcagtggggtttagcatccttggacatggctccacattagaacagtgataacagaacaattattgtgagctcctattgagacaggaaaatagggtctagaaacagggaacttaaggccactctgtgctaacttcctaaaagagaaaacaccagggtctggaggcaggaaatctaaggccaattcactctgacttcccaaagctggatcaaaaggaaaataccggggtctgggggcaggaaacctaaggctgattaacacaaacttcctaaagctaaaccaaaagacaaaaaccccatctctccatgctgagtaacaaaggatcagaggctactctccctacaaccatccctcttccaccacatctcagatggaaagggaggggagggtgccttgttgaccatgggccaagcagggaccatcccttcatctgcatagggtgccagttcacctcagcctttaattagccacagaccaaatccttcatccagataaggggtagtcattaagaacctcaaatagggtacttaaagcccagaaaactttgtaactgggcccttgagccacttgctcagacccactctcaccttgcagagggctttctcactttaataaattcctgctttcactgctttgttcctgcatttcattcctctgctactttatgcattttgttcaattctttgttcaaaacgccaaagacctggacaactcgtagtcaatctgctgtgctaagtgctctgctagtctgtgtcatttactgtgcacacccatctcttgggtggatattaggaatgagcccatttctccaatgagccaagctaggccatggaggggttgagccatggtgcagtttctgcagtgaagaagcaacagggccagaataggcccacatggtcagactctcagacttacaaccttactcaagtacaatgagtgttccaatgatctgagcagaagaagttgtctttgtaagcagaaaatggctgaagaaagcaaaaagagaaaacagagcagattagtcattgatgtggtttggctgttttgtccctctaaatctcatgttgaaatgtgaccttcagcgttggaggtgggtttagtgggaggtgtttgggtcatagaggtggatctctcataaatggtttggtgctgtccttgtggtaatgagtgagttctctgttaggtacaaaccaccccaaagagcttcttggtactgccaacactccccgcaaacctctccgcgctgcccacccttcccccaaaccttcttacatttccaagcccttatctaggcaccgcagtgaagccagcctgatagaagactttacctatcaggccttgctgcgataaagcaaaccccaattacaaaccatccggaccaaacggggaggttgtgggaagcataaacaaactttacctacaccctccagtaccgtaaacatcacaaggtgatatgtggcagaattaaccagcagacaaccccgggatgcagccataccaaaggactccctcaaactccctgccccaatgtaaaccccctattctgtaagcttggggctgctttccttgactgttaagggggcagccgacaggttaataaaggcttgcctgaacttggggctctctctctctggtcctttctctcggctaaccttacattctcactctctaagttcacatgagatctggttgctttaaaaagcctggcagctctttgttctctctcgccatgtgatatgctgattacccttttgccttctgccatgactgcaagcttcctgagcccttaccagaagagatgccagtgccatgcctcctgtacgccctgcagaagcatgagccaaaataaacatttttctttataaattacctagcctcaggtattcctttatagcaatgcaaaactgactaacatataaaattggtacaggagttgggtgatgctatacagatatctgaagatgtgaaagcagctttggatctgggtaatgggcagagatatcagaagatatcagaagaagacaggaagatgcaggaatgtttcaaacttattggagatttgttaagtggttttgaccaaattgctgacagaaatatggacaatgaaggccaggctgatgaggtctcagatggaaatgaggaatttactggcaaaggtcacccttgttatatcttagcaaagaacttggctgcactgggtccatgctctagagatctgtggaagtttgaacttaagggtgataaattagtgtatctggccaaagggatttctaagcagcaaagtattcaagatgttccttggctgcttctaacaacctgtctcagatgtaggagaaaaggaaagacttaaagttggaatttataattaaaagagaagcagagcataaaagtttggaaaatttgcagcctgaccatgttgtagggaaagaaagagcattttcggagaagaaaccaagcaggatgctgaggaaccacttgctggagagctttgcacgactaaaagggagccaagtgctactatctaaaacaatgggaaaaagcccttgaaggcatttcagaaatctaggcccctcccatcccaggcccagaagcctagtgggtaagaatggttttgggggccaagcctggggccctgctgctctctgtagcctttggacactgctacctgcatctggctgatccagctccacccatggctcaaagtgccccagatacagttcaggccactgccttggaggacacaagctataagacttggtggcttccccatggtgttatgtctgcaggagaacagaatgcaagagtgaaaaaggcttgacagcttccacctaggtttcagagggtgtatgtgttgaaaagcctgagtgcccagggaaaagcctgccacaagggtcgagctcctacagagagactctactagaacagtgctcatggaaaatgtggggttggagcccctgcacagagtcatcatggtactgctgagtgggattgtgggaaggtggctgagaatggtagagccaccagcggcttgtactctgaacctggaaaagcaaccggcactcaactccaaccagtgagagtagccatgggagctgcacctgcagagccacagggatgggtatgcacaaggccttggcatcccaccccttccatcactgtgccctggatgcagaatatggagacaaaggagattattttggagctctaagatttaatgacagccctgctgggtgtcagacttgtgtggtgcctgttgcccctttcttttggctgatttatctcttttggaattggaatatttacccaatgcctggatcaccattgtatcttggaagtaaataacttgtttttttatcttacaggctcatagttggaagaaacgtgccttgagtctcagattttggaattttgagttgatgctgaaatgagttgagacttttggggaactattgggaagggatgcttgtattctgcagtgcaaaaaggatgtgagatttgttggggggtcatgggcagaatgaaacagcttgggtattttgtgcccttcaaatatcatgttgaaatgtgaactccaatgttggaggtgggcctagtgggagaggtgtttgggtcatgggggtgggtcctttataaataacttgctgctgtcctcacaataatgagtgagttctctctgtctgtgagttcacatgagatctggttatttaaaagagcctggcagcttctccttttcttgcttgctctctcactcgccatgtgatatgccagctcctcttttgccttctgccatgaatggaagcttcctgagccctcacaagaaggctatgatgacgccatgcttcctgtacagcctgcagaaatgcgagtcaaaatgaacctcttttcttgacaaattacccagcctcaggtattcttttataacagtgcaaaagtgaccaacacagtcatttcaaagttactttccttctagagttaaaagatgaggggacacgcttataacactgactcaggttgactgaaccttctgagtatttttgtatttttttttaattggcccctttgaaagttcagtataattatgtggcattcggcacaagtgaccccattctggttgggtctggtcagccggggcttagggaaggaggctagtccacagcagtggcatcccctgaagtttgtttcacacaggcccctgagttaatgagtctttctaaaggaggctttgcttggtttgcttatcagccatctttccactcttactgtagacagggacacctggatgctcataatttgcttttttttttttttttttttttttggagacagagtctcgctctgtagccaggctggaatgcagtggtgtgatcttggctcactgcaacctccgccttccaggttcaagtgattctcctgccttagcctcccgagtaactgggattacatgctgggattatgtgccagcatgcccagctaatttttgtagttttagtagagacggggtttcaccatgttgggcagaatggtctcgatctcttgacctcgtggtccacccgcctcaacctcctaaaatgctgggattacagacgtgagccaccacgcctggccgtgcacgtttttaaaaattaattaatttatcctgttgccctgctcagagtaaaatatgctggttttcttttctacagtatcttaaaagccttttgtaacaatgtttgtgagcaattgtgttaaaattattctgaattaatatctaatgcttgaacacacacactgtgcatgtctgtgtgtgtgtgttaaactcaagtatagcacatagagcctctgtaggtgataattcttgcctcttgggttccctggaaaaaggaagtccatatggaaaagagaggcagtctccaggtagagatacatcttcagggattttaaaggaaattttcagcttgtgttctataaaagcaccaaaggtgacttgtgtgtatagcccctaggttggaggaaagccttgctggtttttctttttcttttttcttttttctttttctttttctttttctttttaccttgctggtttttgctggtttcattgcagcatttcagctctcctgcaacaccactgacatttctctattgtttttctcctccacactgagacctattggctcagaagtccaccagcataaaacccagattttcatacttctaaattgttttcaacatagctcaaccaggaagattgttaggcattggaggccttcctggctttcataccctggtaaacctcaccccacatgtgctaaccatagataagatggagccttgtggttagaagacccccaagacactgtctagctgctgagaaacatcacttagactcataagctccttctccaatttccatctcccccagcagttctcttgccttcctccccatttgatggtgatcccacacccataaactctagacagtcttttactctgaggatgtccccgcttctgctaccctatccaagcaccacccaataaagttgtttgtgtggtactgcccctggttggtcatagcatttttcttgatcaaccccctaatcctgcacagtgtgcaatgaactctgctgaacttggagtctcgcacttagaggttgatgattatctgagctgaggtgtgtgattttagggggtctgtttggactgttaaactgataaggccagaaggccttagaaaagcacaccaggcaggcttctcactgggacatggaatgctgctgttgtctggtcttgaagcatctcagctttcctgctgcagtagaaaactctctgactgttttggaacccagaagtcacaaattacaataggcttgtctcgactctaagctaaaacccaaaaatgtccactctgggctgtttcagactcatgtcaagctgtgctgaacagaaagcaggcatagctcgatgcactggaggggtctttgaccctgtgatcctggtaggttttgaacacccctctctggagttagaaactgtcacaacctagatgctgtcctggactgtctgcatctcttgcagatgcccatgatgaggggattgttctctggtggggccagcgagagtggagctgttcatgaacactgtatttttgatgtagacaggttgcattttttactggtaatgctgtcaaaagctgcacattgagggagggcacccaaca

SEQ ID NO: 814 - DNA, 1435 bp, Homo sapiens
gcccccgcgccggcggcggcgcggcgcccgcgcttccgtagcgctcctcgtaggccggggctcggcgcgcgcacccgcactaaagacgcttcttcccggagggtaggaatcccgccggcgagccgaacagttccccgagcgcagcccgcggaccaccacccggccgcacgggccgcttttgtcccccgcccgccgcttctgtccgagaggccgcccgcgaggcgcatcctgaccgcgagcgtcgggtcccagagccgggcgcggctggggcccgaggctagcatctctcgggagccgcaaggcgagagctgcaaagatgtaaaagtcaagagaagactctaaaaatagcaaagatgcttttgagccagaatgccttcatcgtcagatcacttaatttggttctcatggtgtatatcagcctcgtgtttggtatttcatatgattcgcctgattacacagatgaatcttgcactttcaagatatcattgcgaaatttccggtccatcttatcatgggaattaaaaaaccactccattgtaccaactcactatacattgctgtatacaatcatgagtaaaccagaagatttgaaggtggttaagaactgtgcaaataccacaagatcattttgtgacctcacagatgagtggagaagcacacacgaggcctatgtcaccgtcctagaaggattcagcgggaacacaacgttgttcagttgctcacacaatttctggctggccatagacatgtcttttgaaccaccagagtttgagattgttggttttaccaaccacattaatgtgatggtgaaatttccatctattgttgaggaagaattacagtttgatttatctctcgtcattgaagaacagtcagagggaattgttaagaagcataaacccgaaataaaaggaaacatgagtggaaatttcacctatatcattgacaagttaattccaaacacgaactactgtgtatctgtttatttagagcacagtgatgagcaagcagtaataaagtctcccttaaaatgcaccctccttccacctggccaggaatcagaatcagcagaatctgccaaaataggaggaataattactgtgtttttgatagcattggtcttgacaagcaccatagtgacactgaaatggattggttatatatgcttaagaaatagcctccccaaagtcttgaggcaaggtctcactaagggctggaatgcagtggctattcacaggtgcagtcataatgcactacagtctgaaactcctgagctcaaacagtcgtcctgcctaagcttccccagtagctgggattacaagcgtgcatccctgtgccccagtgattaagttttattatgtagaaaataaagagcaaacagttacagctgaaaaaaaaaaaaaaaaaaaaaaaaaaaaaaaaaaaaaaaaaaaaa

SEQ ID NO: 815 - DNA, 4171 bp, Homo sapiens
  misc_feature (3273)..(3273): n is a, c, g, or t
  misc_feature (3310)..(3310): n is a, c, g, or t
  misc_feature (3329)..(3329): n is a, c, g, or t
  misc_feature (3767)..(3767): n is a, c, g, or t
  misc_feature (3798)..(3798): n is a, c, g, or t
aagacttaggaagactggtggatgcgtttgggttgtagctaggctttttcttttctttctcttttaaaacacatctagacaaggaaaaaacaagcctcggatctgatttttcactcctcgttcttgtgcttggttcttactgtgtttgtgtattttaaaggcgagaagacgaggggaacaaaaccagctggatccatccatcaccgtgggtggttttaatttttcgttttttctcgttatttttttttaaacaaccactcttcacaatgaacaaactgtatatcggaaacctcagcgagaacgccgccccctcggacctagaaagtatcttcaaggacgccaagatcccggtgtcgggacccttcctggtgaagactggctacgcgttcgtggactgcccggacgagagctgggccctcaaggccatcgaggcgctttcaggtaaaatagaactgcacgggaaacccatagaagttgagcactcggtcccaaaaaggcaaaggattcggaaacttcagatacgaaatatcccgcctcatttacagtgggaggtgctggatagtttactagtccagtatggagtggtggagagctgtgagcaagtgaacactgactcggaaactgcagttgtaaatgtaacctattccagtaaggaccaagctagacaagcactagacaaactgaatggatttcagttagagaatttcaccttgaaagtagcctatatccctgatgaaatggccgcccagcaaaaccccttgcagcagccccgaggtcgccgggggcttgggcagaggggctcctcaaggcaggggtctccaggatccgtatccaagcagaaaccatgtgatttgcctctgcgcctgctggttcccacccaatttgttggagccatcataggaaaagaaggtgccaccattcggaacatcaccaaacagacccagtctaaaatcgatgtccaccgtaaagaaaatgcgggggctgctgagaagtcgattactatcctctctactcctgaaggcacctctgcggcttgtaagtctattctggagattatgcataaggaagctcaagatataaaattcacagaagagatccccttgaagattttagctcataataactttgttggacgtcttattggtaaagaaggaagaaatcttaaaaaaattgagcaagacacagacactaaaatcacgatatctccattgcaggaattgacgctgtataatccagaacgcactattacagttaaaggcaatgttgagacatgtgccaaagctgaggaggagatcatgaagaaaatcagggagtcttatgaaaatgatattgcttctatgaatcttcaagcacatttaattcctggattaaatctgaacgccttgggtctgttcccacccacttcagggatgccacctcccacctcagggcccccttcagccatgactcctccctacccgcagtttgagcaatcagaaacggagactgttcatctgtttatcccagctctatcagtcggtgccatcatcggcaagcagggccagcacatcaagcagctttctcgctttgctggagcttcaattaagattgctccagcagaagcaccagatgctaaagtgaggatggtgattatcactggaccaccagaggctcagttcaaggctcagggaagaatttatggaaaaattaaagaagaaaactttgttagtcctaaagaagaggtgaaacttgaagctcatatcagagtgccatcctttgctgctggcagagttattggaaaaggaggcaaaacggtgaatgaacttcagaatttgtcaagtgcagaagttgttgtccctcgtgaccagacacctgatgagaatgaccaagtggttgtcaaaataactggtcacttctatgcttgccaggttgcccagagaaaaattcaggaaattctgactcaggtaaagcagcaccaacaacagaaggctctgcaaagtggaccacctcagtcaagacggaagtaaaggctcaggaaacagcccaccacagaggcagatgccaaaccaaagacagattgcttaaccaacagatgggcgctgaccccctatccagaatcacatgcacaagtttttacctagccagttgtttctgaggaccaggcaacttttgaactcctgtctctgtgagaatgtatactttatgctctctgaaatgtatgacacccagctttaaaacaaacaaacaaacaaacaaaaaaagggtgggggagggagggaaagagaagagctctgcacttccctttgttgtagtctcacagtataacagatattctaattcttcttaatattcccccataatgccagaaattggcttaatgatgctttcactaaattcatcaaatagattgctcctaaatccaattgttaaaattggatcagaataattatcacaggaacttaaatgttaagccattagcatagaaaaactgttctcagttttatttttacctaacactaacatgagtaacctaagggaagtgctgaatggtgttggcaggggtattaaacgtgcatttttactcaactacctcaggtattcagtaatacaatgaaaagcaaaattgttccttttttttgaaaattttatatactttataatgatagaagtccaaccgttttttaaaaaataaatttaaaatttaacagcaatcagctaacaggcaaattaagatttttacttctggctggtgacagtaaagctggaaaattaatttcagggttttttgaggcttttgacacagttattagttaaatcaaatgttcaaaaatacggagcagtgcctagtatctggagagcagcactaccatttattctttcatttatagttgggaaagtttttgacggtactaacaaagtggtcgcaggagattttggaacggctggtttaaatggcttcaggagacttcagttttttgtttagctacatgattgaatgcataataaatgctttgtgcttctgactatcaatacctaaagaaagtgcatcagtgaagagatgcaagactttcaactgactggcaaaaagcaagctttagcttgtcttataggatgcttagtttgccactacacttcagaccaatgggacagtcatagatggtgtgacagtgtttaaacgcaacaaaaggctacatttccatggggccagcactgtcatgagcctcactaagctattttgaagatttttaagcactgataaattaaaaaaaaaaaattagactccaccttaagtantaaagtataacaggatttatgtatactgtgcaatcanttctttgaaaaaaaagtcnaaagatagagaatacaagaaaagtttttgggatataatttgaatgactgtgaaaacatatgacctttgataacgaactcatttgctcactccttgacagcaaagcccagtacgtacaattgtgttgggtgtgggtggtctccaaggccacgctgctctctgaattgattttttgagttttgtttgtaagatgatcacagtcatgttacactgatctaaaggacatatatataaccctttaaaaaaaaaatcactgcctcattcttatttcaagatgaatttctatacagactagatgtttttctgaagatcaattagacattttgaaaatgatttaaagtgttttccttaatgttctctgaaaacaagtttcttttgtagttttaaccaaaaaagtgccctttttgtcactgggattctcctagcattcatgattttngtttcatacaatgaattaaaattggctaaantcatggactggctttctgggttggatttcaggtaagatgtgtttaaggccagagcttttctcagtatttgatttttttccccaatatttgattttttaaaaatatacacataggtgctgcatttatatctgctggtttaaattctgtcatatttcacttctagccttttagtatggcaaatcatattttacttttacttaagcatttgtaatttggagtatctggtactagctaagaaataattctataattgagttttgtactcaccatatatggatcattcctcatgtataatgtgccccaaatgcagcttcattttccagataccttgacgcagaataaattttttcatcatttaggtgcaaaaaaaaaa

SEQ ID NO: 816 - DNA, 5942 bp, Homo sapiens
ccgggtccttctccgagagccgggcgggcacgcgtcattgtgttacctgcggccggcccgcgagctaggctggttttttttttttctcccctccctcccccctttttccatgcagctgatctaaaagggaataaaaggctgcgcataatcataataataaaagaaggggagcgcgagagaaggaaagaaagccgggaggtggaagaggagggggagcgtctcaaagaagcgatcagaataataaaaggaggccgggctctttgccttctggaacgggccgctcttgaaagggcttttgaaaagtggtgttgttttccagtcgtgcatgctccaatcggcggagtatattagagccgggacgcggcggccgcaggggcagcggcgacggcagcaccggcggcagcaccagcgcgaacagcagcggcggcgtcccgagtgcccgcggcgcgcggcgcagcgatgcgttccccacggacgcgcggccggtccgggcgccccctaagcctcctgctcgccctgctctgtgccctgcgagccaaggtgtgtggggcctcgggtcagttcgagttggagatcctgtccatgcagaacgtgaacggggagctgcagaacgggaactgctgcggcggcgcccggaacccgggagaccgcaagtgcacccgcgacgagtgtgacacatacttcaaagtgtgcctcaaggagtatcagtcccgcgtcacggccggggggccctgcagcttcggctcagggtccacgcctgtcatcgggggcaacaccttcaacctcaaggccagccgcggcaacgaccgcaaccgcatcgtgctgcctttcagtttcgcctggccgaggtcctatacgttgcttgtggaggcgtgggattccagtaatgacaccgttcaacctgacagtattattgaaaaggcttctcactcgggcatgatcaaccccagccggcagtggcagacgctgaagcagaacacgggcgttgcccactttgagtatcagatccgcgtgacctgtgatgactactactatggctttggctgcaataagttctgccgccccagagatgacttctttggacactatgcctgtgaccagaatggcaacaaaacttgcatggaaggctggatgggccgcgaatgtaacagagctatttgccgacaaggctgcagtcctaagcatgggtcttgcaaactcccaggtgactgcaggtgccagtacggctggcaaggcctgtactgtgataagtgcatcccacacccgggatgcgtccacggcatctgtaatgagccctggcagtgcctctgtgagaccaactggggcggccagctctgtgacaaagatctcaattactgtgggactcatcagccgtgtctcaacgggggaacttgtagcaacacaggccctgacaaatatcagtgttcctgccctgaggggtattcaggacccaactgtgaaattgctgagcacgcctgcctctctgatccctgtcacaacagaggcagctgtaaggagacctccctgggctttgagtgtgagtgttccccaggctggaccggccccacatgctctacaaacattgatgactgttctcctaataactgttcccacgggggcacctgccaggacctggttaacggatttaagtgtgtgtgccccccacagtggactgggaaaacgtgccagttagatgcaaatgaatgtgaggccaaaccttgtgtaaacgccaaatcctgtaagaatctcattgccagctactactgcgactgtcttcccggctggatgggtcagaattgtgacataaatattaatgactgccttggccagtgtcagaatgacgcctcctgtcgggatttggttaatggttatcgctgtatctgtccacctggctatgcaggcgatcactgtgagagagacatcgatgaatgtgccagcaacccctgtttggatgggggtcactgtcagaatgaaatcaacagattccagtgtctgtgtcccactggtttctctggaaacctctgtcagctggacatcgattattgtgagcctaatccctgccagaacggtgcccagtgctacaaccgtgccagtgactatttctgcaagtgccccgaggactatgagggcaagaactgctcacacctgaaagaccactgccgcacgaccccctgtgaagtgattgacagctgcacagtggccatggcttccaacgacacacctgaaggggtgcggtatatttcctccaacgtctgtggtcctcacgggaagtgcaagagtcagtcgggaggcaaattcacctgtgactgtaacaaaggcttcacgggaacatactgccatgaaaatattaatgactgtgagagcaacccttgtagaaacggtggcacttgcatcgatggtgtcaactcctacaagtgcatctgtagtgacggctgggagggggcctactgtgaaaccaatattaatgactgcagccagaacccctgccacaatgggggcacgtgtcgcgacctggtcaatgacttctactgtgactgtaaaaatgggtggaaaggaaagacctgccactcacgtgacagtcagtgtgatgaggccacgtgcaacaacggtggcacctgctatgatgagggggatgcttttaagtgcatgtgtcctggcggctgggaaggaacaacctgtaacatagcccgaaacagtagctgcctgcccaacccctgccataatgggggcacatgtgtggtcaacggcgagtcctttacgtgcgtctgcaaggaaggctgggaggggcccatctgtgctcagaataccaatgactgcagccctcatccctgttacaacagcggcacctgtgtggatggagacaactggtaccggtgcgaatgtgccccgggttttgctgggcccgactgcagaataaacatcaatgaatgccagtcttcaccttgtgcctttggagcgacctgtgtggatgagatcaatggctaccggtgtgtctgccctccagggcacagtggtgccaagtgccaggaagtttcagggagaccttgcatcaccatggggagtgtgataccagatggggccaaatgggatgatgactgtaatacctgccagtgcctgaatggacggatcgcctgctcaaaggtctggtgtggccctcgaccttgcctgctccacaaagggcacagcgagtgccccagcgggcagagctgcatccccatcctggacgaccagtgcttcgtccacccctgcactggtgtgggcgagtgtcggtcttccagtctccagccggtgaagacaaagtgcacctctgactcctattaccaggataactgtgcgaacatcacatttacctttaacaaggagatgatgtcaccaggtcttactacggagcacatttgcagtgaattgaggaatttgaatattttgaagaatgtttccgctgaatattcaatctacatcgcttgcgagccttccccttcagcgaacaatgaaatacatgtggccatttctgctgaagatatacgggatgatgggaacccgatcaaggaaatcactgacaaaataattgatcttgttagtaaacgtgatggaaacagctcgctgattgctgccgttgcagaagtaagagttcagaggcggcctctgaagaacagaacagatttccttgttcccttgctgagctctgtcttaactgtggcttggatctgttgcttggtgacggccttctactggtgcctgcggaagcggcggaagccgggcagccacacacactcagcctctgaggacaacaccaccaacaacgtgcgggagcagctgaaccagatcaaaaaccccattgagaaacatggggccaacacggtccccatcaaggattacgagaacaagaactccaaaatgtctaaaataaggacacacaattctgaagtagaagaggacgacatggacaaacaccagcagaaagcccggtttgccaagcagccggcgtatacgctggtagacagagaagagaagccccccaacggcacgccgacaaaacacccaaactggacaaacaaacaggacaacagagacttggaaagtgcccagagcttaaaccgaatggagtacatcgtatagcagaccgcgggcactgccgccgctaggtagagtctgagggcttgtagttctttaaactgtcgtgtcatactcgagtctgaggccgttgctgacttagaatccctgtgttaatttaagttttgacaagctggcttacactggcaatggtagtttctgtggttggctgggaaatcgagtgccgcatctcacagctatgcaaaaagctagtcaacagtaccctggttgtgtgtccccttgcagccgacacggtctcggatcaggctcccaggagcctgcccagccccctggtctttgagctcccacttctgccagatgtcctaatggtgatgcagtcttagatcatagttttatttatatttattgactcttgagttgtttttgtatattggttttatgatgacgtacaagtagttctgtatttgaaagtgcctttgcagctcagaaccacagcaacgatcacaaatgactttattatttatttttttaattgtatttttgttgttgggggaggggagactttgatgtcagcagttgctggtaaaatgaagaatttaaagaaaaaaatgtcaaaagtagaactttgtatagttatgtaaataattcttttttattaatcactgtgtatatttgatttattaacttaataatcaagagccttaaaacatcattcctttttatttatatgtatgtgtttagaattgaaggtttttgatagcattgtaagcgtatggctttatttttttgaactcttctcattacttgttgcctataagccaaaattaaggtgtttgaaaatagtttattttaaaacaataggatgggcttctgtgcccagaatactgatggaattttttttgtacgacgtcagatgtttaaaacaccttctatagcatcacttaaaacacgttttaaggactgactgaggcagtttgaggattagtttagaacaggtttttttgtttgtttgttttttgtttttctgctttagacttgaaaagagacaggcaggtgatctgctgcagagcagtaagggaacaagttgagctatgacttaacatagccaaaatgtgagtggttgaatatgattaaaaatatcaaattaattgtgtgaacttggaagcacaccaatctgactttgtaaattctgatttcttttcaccattcgtacataatactgaaccacttgtagatttgattttttttttaatctactgcatttagggagtattctaataagctagttgaatacttgaaccataaaatgtccagtaagatcactgtttagatttgccatagagtacactgcctgccttaagtgaggaaatcaaagtgctattacgaagttcaagatcaaaaaggcttataaaacagagtaatcttgttggttcaccattgagaccgtgaagatactttgtattgtcctattagtgttatatgaacatacaaatgcatctttgatgtgttgttcttggcaataaattttgaaaagtaatatttattaaatttttttgtatgaaaacatggaacagtgtggctcttctgagcttacgtagttctaccggctttgccgtgtgcttctgccaccctgctgagtctgttctggtaatcggggtataataggctctgcctgacagagggatggaggaagaactgaaaggcttttcaaccacaaaactcatctggagttctcaaagacctggggctgctgtgaagctggaactgcgggagccccatctaggggagccttgattcccttgttattcaacagcaagtgtgaatactgcttgaataaacaccactggattaatggaaaaaaaaaaaaaaaa

SEQ ID NO: 817 - DNA, 4244 bp, Homo sapiens
gggaagcgctccgagggcgtccccgtgtcaggccccatgctcatcgagaaggccaaggacttctacgagcagatgcagctcactgagccctgcgtgttctccggagggtggctttggcgctttaaggccagacacggcattaaaaagctagatgcatccagtgaaaagcagtcagccgaccaccaggccgcggagcagttctgtgcgtttttcaggagcttggctgctgagcacgggctgtccgccgagcaggtttacaacgctgatgagaccggccttttctggcggtgcctgccaaatcccactccggaaggcggggctgtgcctggccccaagcagggcaaggaccggctgaccgtgctgatgtgtgccaacgccacgggctcccacaggctcaagcccttggccatcgggaagtgcagcggtcccagggctttcaaaggcatccagcacctgcccgtcgcctataaggcccaggggaacgcctgggtggacaaggagattttttccgattggttccatcatatctttgtgccctcggtgagagagcacttcagaaccataggtttgccggaagacagcaaagccgttctcttgctggacagctcccgggctcacccgcaggaggccgagctggtgtccagtaacgttttcaccatcttcctgcctgccagcgtggcctcattggtgcagcccatggagcagggcattcggagagatttcatgaggaacttcattaaccctccggtccccctgcagggcccccacgcccgctacaacatgaacgatgccatattcagcgtggcctgtgcctggaacgcagtccctagccacgtcttcaggcgggcctggaggaagctgtggccgtcggttgcgtttgccgaaggctcctcctctgaggaggagttggaggcagagtgcttcccagtgaagccccacaacaagtcctttgcacacatcctggagcttgtgaaggaaggctcctcctgcccgggccagcttcgccagcgccaggccgccagctggggggtagcgggaagggaggcagaagggggacggccccctgctgccacgtcgccagcagaggttgtgtggagttcagaaaagactccgaaagctgaccaggacggcagaggagatcctggtgagggcgaggaggtggcctgggagcaggcggccgtggcctttgacgcagtcctgcgctttgcggagcggcagccatgcttcagtgcgcaggaagtggggcagctgcgggcgctgcgtgccgtgttccggagccagcagcaggtgaggaggcggcgtggtgccctcggggctgtggtcaaggttgaagccctccaggagggccctggtggctgtggggccacagctcagtctcccttgccctgctcatccacagcaggtgacaactgatggcttctctgccctgccctggccactggccctgtttctcccacaccctggagtggcatggtcctgtgccccgaccccacctgaggcaggagggcatgtgcagacactcaagagcccttccaggagtgggtcgcccacgggtgtggctcgggtgcccaggacggtctgtgcccgaggttcctgtcaatacaggttttattttatcacttgccgtgtcatccgaaagtgaggaaatgttttggaagggtccaccctagcctagaacaagccagagccgcaccctggctggaatgggggccaggctgagccgatctggtctcgtgttcgctggctgatcattgcagtatcagagggtggagatgtcagtctgtccacgtggagagaagttgccctccaggccgacaggaggccatgcccaccgcccctggacaggcttcgtctcagaaggctctatctgctgggctggcggccatccccgtgttgggtggaccccgagcacggttgcctgaggtccgatggcccgagagctgggactcagttcttggcctgctagcggctgaacaggccgcacatctcacttcagttgtggcctcattcagcagaatgactctggaaccatcctctgttacccgcagatcctgtcccatgggctctggccccaagatgttggggggccccacggagagttgacttggtagagttcctttctgggaagaaagtaggagtggctgaccaggccctgctcatcacccggatagaggacacggaccctgtgtggtattttggcattttggctcagagtccaatgtaccatgttgcccagaatttcatacttatggcctttacatgaatacgtcttgatcagacattcagagattagtcttaggtttgcacgtaagtcactgaaaacagtaaaacaggctgcttagatttctagcagtatgtgtgctcttatccccagctgttagcacgttagtaatacttttggggaggagttgtctgtcctggtcagttttcacagaggcggttgtaagaggatgtggttattttctccatgtctgtagttgctttgcggcatctccatttcacgggcaacactcactgcctgcagctgagattccagaacgccctgtgtccacagtgattagcctcgtctttcagcgagcataaaataggtgcattgtccttttcttttcttgaggcagggtctcgctctgttgaccaggctggagtgaagtggtgtgatcccagctcactgcagcctcgacctccctggcttgagtgatcctcccgccccagcctcctgagtagctgggactagaggcacgcaccaccgcgcctttttattttttttgtagagacagggtctcactgtgttgcccgggctggtcttgaactcttggcctcaagcgatcctccttcctcatccttctaaagtgctgggattacaggtgtgagccacagcactcggcctaaataggtttttcttgctatgttattttcagtgctttgcccttgaattcttttcctctcttaaattcatatcatttggccgagtcagcacgtagtttgcattccagcgtctgctgttgattccactgaaacctctgttctcatgaaggagaggatttggctcgctgtgtgttctcgtactttcacatctctgtagatacaggggcaaaagtcattgctgacagagccctatctatgtcctggaagtgtgtgtttcttgctttgaatgcatgtgtgaagattataaaagccaaatagtttttaaagatctcggtgctgaacgacagtcccagttcccatttgtgtcccacacaggcgaggatcgttgggcctccttagtagccaaaggaactgaggtccagagcagggaatgtgttgcccagtgtcagcatggtctgctctggggtcaggcgtcttgccctggtcctaagccaccccaagccaaggcatgtccctgggcccatttcctctctcgaggtcttgggttccctatttctgatgtgtgtgaaaggaaggcctgtcctctggggtgaccatgaggctcagtgggaggagctgccaggcttgagctgggacttggcacctggccagccttttttctatttcattgtaccttgatgggctgtcagttctgaagagaaaaaatacactaggaatccattcttcctccaccattctccctggcagagggaagtgactacacccctatggtgtggacatactgacgctcctccatgaagcagcaaagttctgttgtttcaggagactgtgggccttgaggatgtggtagtgacctcaccagaggagttggcaattcctaagtgctgcctggaggcctctacagagacataatgttggagaacttctgccacatggcagtgctgggtaagacccctctgtccccaccagtgcccttgaggttatgggtgttggtaggtctgtggcctccatctccatgacgatggtgttaaggactgcatgtttgtgtccccccccaaagtttatatgttgaaaccctgacccccaggagggtggtattaggaggtggggcctttgggaggtgactaggcttaggtgagatcgtgagggtggggctcgccgatgagatcgagtccttataagaaaaggaaggaactagagcgaggtcactttgtgctgtgtgagcatacaagaaaactgccatcttcaagctgggtgcagtggctcacgcctgtaatcccagcactggaaggccaaggcattaggattgcatgagtccaggagttcgagaccagcctaggcatgataagaccttattgctaaaaaaaaaaaaaaaaaaa

SEQ ID NO: 818 - DNA, 2514 bp, Homo sapiens
cgcgcagcgatggaggcgccggggctcgggcggtggaggcggagccggagcgcggccatggcggggtccctgagtgccagaggtggtggtgttgcttatcttctggaaccccatgcagccagatcccaggcctagcggggctggggcctgctgccgattcctgcccctgcagtcacagtgccctgagggggcaggggacgcggtgatgtacgcctccactgagtgcaaggcggaggtgacgccctcccagcatggcaaccgcaccttcagctacaccctggaggatcataccaagcaggcctttggcatcatgaacgagctgcggctcagccagcagctgtgtgacgtcacactgcaggtcaagtaccaggatgcaccggccgcccagttcatggcccacaaggtggtgctggcctcatccagccctgtcttcaaggccatgttcaccaacgggctgcgggagcagggcatggaggtggtgtccattgagggtatccaccccaaggtcatggagcgcctcattgaattcgcctacacggcctccatctccatgggcgagaagtgtgtcctccacgtcatgaacggtgctgtcatgtaccagatcgacagcgttgtccgtgcctgcagtgacttcctggtgcagcagctggaccccagcaatgccatcggcatcgccaacttcgctgagcagattggctgtgtggagttgcaccagcgtgcccgggagtacatctacatgcattttggggaggtggccaagcaagaggagttcttcaacctgtcccactgccaactggtgaccctcatcagccgggacgacctgaacgtgcgctgcgagtccgaggtcttccacgcctgcatcaactgggtcaagtacgactgcgaacagcgacggttctacgtccaggcgctgctgcgggccgtgcgctgccactcgttgacgccgaacttcctgcagatgcagctgcagaagtgcgagatcctgcagtccgactcccgctgcaaggactacctggtcaagatcttcgaggagctcaccctgcacaagcccacgcaggtgatgccctgccgggcgcccaaggtgggccgcctgatctacaccgcgggcggctacttccgacagtcgctcagctacctggaggcttacaaccccagtgacggcacctggctccggttggcggacctgcaggtgccgcggagcggcctggccggctgcgtggtgggcgggctgttgtacgccgtgggcggcaggaacaactcgcccgacggcaacaccgactccagcgccctggactgttacaaccccatgaccaatcagtggtcgccctgcgcccccatgagcgtgccccgtaaccgcatcggggtgggggtcatcgatggccacatctatgccgtcggcggctcccacggctgcatccaccacaacagtgtggagaggtatgagccagagcgggatgagtggcacttggtggccccaatgctgacacgaaggatcggggtgggcgtggctgtcctcaatcgtctcctttatgccgtggggggctttgacgggacaaaccgccttaattcagctgagtgttactacccagagaggaacgagtggcgaatgatcacagcaatgaacaccatccgaagcggggcaggcgtctgcgtcctgcacaactgtatctatgctgctgggggctatgatggtcaggaccagctgaacagcgtggagcgctacgatgtggaaacagagacgtggactttcgtagcccccatgaagcaccggcgaagtgccctggggatcactgtccaccaggggagaatctacgtccttggaggctatgatggtcacacgttcctggacagtgtggagtgttacgacccagatacagacacctggagcgaggtgacccgaatgacatcgggccggagtggggtgggcgtggctgtcaccatggagccctgccggaagcagattgaccagcagaactgtacctgttgaggcacttttgtttcttgggcaaaaatacagtccaatggggagtatcattgtttttgtacaaaaaccgggactaaaagaaaagacagcactgcaaataacccatcttccgggaagggaggccaggatgcctcagtgttaaaatgacatctcaaaagaagtccaaagcgggaatcatgtgcccctcagcggagccccgggagtgtccaagacagcctggctgggaaagggggtgtggaaagagcaggcttccaggagagaggcccccaaaccctctggccgggtaataggcctgggtcccactcacccatgccggcagctgtcaccatgtgatttattcttggatacctgggagggggccaatgggggcctcagggggaggccccctctggaaatgtggttcccagggatgggcctgtacatagaagccaccggatggcacttccccaccggatggacagttattttgttgataagtaaccctgtaattttccaagggaacataaagaagagactaactagtgtctttc

SEQ ID NO: 819 - DNA, 1712 bp, Homo sapiens
ggtgggaggggctccgggcggccgggcgggcgcacaccatccccgcgggcggcgcggagccggcgacagcgcgcgagagggaccgggcggtggcggcggcgggaccgggatggaaggttaagtcctgagcagcagcagcagctgcagccgcctggagccaggctgcgcgccccggcccccgcctcggccgcggcgcgcccgcagcccggtgattcgctctctctctctttggcgtttgaagggagcgcggtgactgtccttgagcgcggaggggcgagctcgccggcggagcgccggagcaagcggaggcgcaggagcggcggcgacggcggcggcggcggcggcgcccgagcacccgagggggtccgagccccggcagccggccagccccgcgccacaaagggagcgcccccgccgcccggcaccccgcctccctccccaatgtcctcggccatcgaaaggaagagcctggacccttcagaggaaccagtggatgaggtgctgcagatccccccatccctgctgacatgcggcggctgccagcagaacattggggaccgctacttcctgaaggccatcgaccagtactggcacgaggactgcctgagctgcgacctctgtggctgccggctgggtgaggtggggcggcgcctctactacaaactgggccggaagctctgccggagagactatctcaggctttttgggcaagacggtctctgcgcatcctgtgacaagcggattcgtgcctatgagatgacaatgcgggtgaaagacaaagtgtatcacctggaatgtttcaagtgcgccgcctgtcagaagcatttctgtgtaggtgacagatacctcctcatcaactctgacatagtgtgcgaacaggacatctacgagtggactaagatcaatgggatgatataggcccgagtccccgggcatctttggggaggtgttcactgaagacgccgtctccatggcatcttcgtcttcactcttaggcactttgggggtttgagggtggggtaagggatttcttaggggatggtagacctttattgggtatcaagacatagcatccaagtggcataattcaggggctgacacttcaaggtgacagaaggaccagcccttgagggagaacttatggccacagcccatccatagtaactgacatgattagcagaagaaaggaacatttaggggcaagcaggcgctgtgctatcatgatggaatttcatatctacagatagagagttgttgtgtacagacttgttgtgactttgacgcttgcgaactagagatgtgcaattgatttcttttcttcctggctttttaactcccctgtttcaatcactgtcctccacacaagggaaggacagaaaggagagtggccattctttttttcttggcccccttcccaaggccttaagctttggacccaaggaaaactgcatggagacgcatttcggttgagaatggaaaccacaacttttaaccaaacaattatttaaagcaatgctgatgaatcactgtttttagacaccttcattttgaggggaggagttccacagattgtttctatacaaatataaatcttaaaaagttgttcaactattttattatcctagattatatcaaagtatttgtcgtgtgtagaaaaaaaaaacagctctgcaggcttaataaaaatgacagacagaaaaaaaaaaaaaaaa

SEQ ID NO: 820 - DNA, 3039 bp, Homo sapiens
gcggcgaggctcccgcgcgcggctgagtgcggactggagtgggaacccgggtccccgcgcttagagaacacgcgatgaccacgtggagcctccggcggaggccggcccgcacgctgggactcctgctgctggtcgtcttgggcttcctggtgctccgcaggctggactggagcgccctggtccctctgcggctccgccatcgacagctggggctgcaggccaagggctggaacttcatgctggaggattccaccttctggatcttcggggctccatccactatttccgtgtgcccagggagtactggagggaccgcctgctgaagatgaaggcctgtggcttgaacaccctcaccacctatgttccgtggaacctgcatgagccagaaagaggcaaatttgacttctctgggaacctggacctggaggccttcgtcctgatggccgcagagatcgggctgtgggtgattctgcgtccaggcccctacatctgcagtgagatggacctcgggggcttgcccagctggctactccaagaccctggcatgaggctgaggacaacttacaagggcttcaccgaagcagtggacctttattttgaccacctgatgtccagggtggtgccactccagtacaagcgtgggggacctatcattgccgtgcaggtggagaatgaatatggttcctataataaagaccccgcatacatgccctacgtcaagaaggcactggaggaccgtggcattgtggaactgctcctgacttcagacaacaaggatgggctgagcaaggggattgtccagggagtcttggccaccatcaacttgcagtcaacacacgagctgcagctactgaccacctttctcttcaacgtccaggggactcagcccaagatggtgatggagtactggacggggtggtttgactcgtggggaggccctcacaatatcctggattcttctgaggttttgaaaaccgtgtctgccattgtggacgccggctcctccatcaacctctacatgttccacggaggcaccaactttggcttcatgaatggagccatgcacttccatgactacaagtcagatgtcaccagctatgactatgatgctgtgctgacagaagccggcgattacacggccaagtacatgaagcttcgagacttcttcggctccatctcaggcatccctctccctcccccacctgaccttcttcccaagatgccgtatgagcccttaacgccagtcttgtacctgtctctgtgggacgccctcaagtacctgggggagccaatcaagtctgaaaagcccatcaacatggagaacctgccagtcaatgggggaaatggacagtccttcgggtacattctctatgagaccagcatcacctcgtctggcatcctcagtggccacgtgcatgatcgggggcaggtgtttgtgaacacagtatccataggattcttggactacaagacaacgaagattgctgtccccctgatccagggttacaccgtgctgaggatcttggtggagaatcgtgggcgagtcaactatggggagaatattgatgaccagcgcaaaggcttaattggaaacctctatctgaatgattcacccctgaaaaacttcagaatctatagcctggatatgaagaagagcttctttcagaggttcggcctggacaaatggagttccctcccagaaacacccacattacctgctttcttcttgggtagcttgtccatcagctccaccccttgtgacacctttctgaagctggagggctgggagaagggggttgtattcatcaatggccagaaccttggacgttactggaacattggaccccagaagacgctttacctcccaggtccctggttgagcagcggaatcaaccaggtcatcgtttttgaggagacgatggcgggccctgcattacagttcacggaaaccccccacctgggcaggaaccagtacattaagtgagcggtggcaccccctcctgctggtgccagtgggagactgccgcctcctcttgacctgaagcctggtggctgctgccccacccctcactgcaaaagcatctccttaagtagcaacctcagggactgggggctacagtctgcccctgtctcagctcaaaaccctaagcctgcagggaaaggtgggatggctctgggcctggctttgttgatgatggctttcctacagccctgctcttgtgccgaggctgtcgggctgtctctagggtgggagcagctaatcagatcgcccagcctttggccctcagaaaaagtgctgaaacgtgcccttgcaccggacgtcacagccctgcgagcatctgctggactcaggcgtgctctttgctggttcctgggaggcttggccacatccctcatggccccattttatccccgaaatcctgggtgtgtcaccagtgtagagggtggggaaggggtgtctcacctgagctgactttgttcttccttcacaaccttctgagccttctttgggattctggaaggaactcggcgtgagaaacatgtgacttcccctttcccttcccactcgctgcttcccacagggtgacaggctgggctggagaaacagaaatcctcaccctgcgtcttcccaagttagcaggtgtctctggtgttcagtgaggaggacatgtgagtcctggcagaagccatggcccatgtctgcacatccagggaggaggacagaaggcccagctcacatgtgagtcctggcagaagccatggcccatgtctgcacatccagggaggaggacagaaggcccagctcacatgtgagtcctggcagaagccatggcccatgtctgcacatccagggaggaggacagaaggcccagctcagtggcccccgccccccaccccccacgcccgaacagcaggggcagagcagccctccttcgaagtgtgtccaagtccgcatttgagccttgttctggggcccagcccaacacctggcttgggctcactgtcctgagttgcagtaaagctataaccttgaatcac

SEQ ID NO: 821 - DNA, 3778 bp, Homo sapiens
cgtatataaacttggtcatgtggcttggttttaaaacagttcccttgactgtaattggcaggtgatagcatctacagcatggaaacctgcacctagtaggtgcttaagcatagcttcccttcccatgaagaggaggagacagggcacccactggccgagaggacaggagagatttagttcattaaggctgctcctctgtgctgcccccaccccgcttctgtggcaggcctggacctgatctgcaaacagacttgcctgcctgtgcctgtccctgaggcccatctccagagcagagggagggcatgcaccgctgggctgggtggtggtcctggctgagcctcctgctctcaccttggaccatttgaggtgcgtgctcagagagtcctttgttgccatgagacacttgccagccatgtcccgggatccacctgttctgccacaagaactgtgtctgtgacatgctgtcatcattggtagagactcctggcactagaacagatgacagaaacccacttataccagcgtaagcaaaacaaggaagtcctgtgttacaaatctgaaaagtgtagtagatttggtgctgggcagggctagatccaggtacttaaacaggttggccaggcatttgtctgtctgtttctgagctctcctctcctatgtcgacatctttgttctcaagcagcttttcctgtgtgttgggagaagccatccccagctgctctaagcttagctacctcagtagagagagaaggtcgcttttctaatagtttctgcggaagtccaaaggctgtttctccatagtcagatctgggtcacgcaccccatgtatgaagaatgcaggtagaagtggtttccttaaagacaatgggaatgctcattgatttgaggagaaagcagaaccctgaatgtctacaagatactctcatgccctaggtgaacctggggacacatatccagcccaccagcacctgtcaggcctggtctctggggctgccagggtttgggttctgtctggagcaccagagtaaggcaggctgtggaaggagttgaagcaagtgctaaattaggtagggtctcttgggctgggcagaggagtcactgggagccatgcaggagcttgttaaacagggagtggcatcagatttgtgccagctgtttgtggagggcccgtgagcaggaattggggcagtggacaacaaggcaggaggactgacgcagaacacattgcagcaactcagggaaggatgatgatggcttggactttggtggtggcagttgcctgtgtgtatggagagaaatacatggatttggaagatatgttatgccacgctgttgacaggacctggtgacttgctgaatgtctgatctctgggtctaagttttgacccctgtatggtgaggtcagacgttggaccgggaggtctctgaagttgcttctagctctagttctgtgatttggggctgtgtgagcagcatagtctggtgcttatagtggagatgctccttatgtggtgctgtggggtctttgcatgcctgggccccccagcgagggtcctcagagaccagtgctctcagcagtgctcttgggtactgactagcctgctgcctgccgcctttggccctgcgtgtgagagtgcccgtgtaggacacaccctggcctctgctcaccagctgcatggcccatctgcatgccagacatgcctgcccacggctgggtttcatcacctcccttccctctgcatgctcctgtgtctgtgtcaagcttccaacttcgggggcgggtggttctaggctgtaccctggactgagaagctcagaacagcttctggtcaggggagtccaaggctggaggtcgtggccaggcacagccacagccacccctccccttgagacccttgtttgttggcgcaggaagccgtctgttcggcgccctcatcatgttactgccatcgtcatgcccatcctgcccgcagaccatgtccctggcctgccctgacccctgcccctccccagtcctcctgagggcagcccttttgcttgggttcccaggttgtgccctgagcatggctgagaccctggcaggcggccctgctgcttgccttatttcttcccctcaggccatggcctggaggtggaggcagtgactccacggcaggtggctgtgtccctctggactggccttctgctctgcccagccatgctctgaggaccctccaccctagggcctgctttctctccttggtgctccagccaggagcaggcagagataggccctggagaacaccctgggttgtggtcctgaccaggcctggaccttgtactgagtccctgtgtgaccctgggcagacaggaccttcctgacaggcctcagtttcctaggctataaaatgggagcttggttgcaagatctctcattgagtaagtcatcgtgctccagacagtccctgagtgtgggggccacttctaggctggaagtgggtggggtgggagtggatgatgagctggggtctggcggtgccacccctcctgtctctgagcatgggtttggctctgaccagaggggcttcctgaatgaggggcccctgcccttccaagcagtcgtgtgtcctgcccggcctgtgagtgcctctctccctcctcctgcagtgcgccgcgtggctcctcgtttctccatccctcccagcagccaggaggtgatgccaggcggcagcgtgaacctgacatgcgtggcagtgggtacacccatgccctacgtgaagtggatgatgggggccgaggagctcaccaaggaggatgagatgccagttggccgcaacgtcctggagctcagcaatgtcgtacgctctgccaactacacctgtgtggccatctcctcgctgggcatgatcgaggccacagcccaggtcacagtgaaaggtgagtgtggcaggtgctgtaaccagtgccctccctgtcatctgggaggtcctggtggtgggcgaatgtgagctggctgccatgggcacaggcatggctgagggattcttgccctttcctgggtgtccctgccctggggtcctccagcccttagagggagggagggatttctgttattagccggcttaatgataatagttaaggcatattgagtttcttggtgggagacatcatgctagcaagcacagttgattttgtttttttctgttttaccctgggagataggtgctcttattatttccatttttgaaacgagggaaccaaggcacagagagggtgtatcacttgccccagggtcacataaaaataaatgacagagcagggacttaaacccagtgtggtctgaatccatatctcaccctcaccactacatagtaccagaccttcaggtttaatagcctcccagcaagaagggtgtggtaaaatagtaggagaaagtgtgttctctctgccctgatacctggggacaggcacacatgtattacacatatgtcacatatatgtaaccgattctggccaggcacggtggctcattcctgtaagcctagcgctttgggaggccaagttggaaggattgcttgagctcaggagtttgagaccagcccagttaacgtagtgagacccccatctctacgaaaaaaaaaaaaaaaactgggcatggtggcacacacctgtggcccagctacttgggagggctgagacaggaggatcacttgagcccaggagggtgaggctacagtgacgcagtgagccatgatcacaccactgcactccagcctgagtgacagagcgagaccctatg

SEQ ID NO: 822 - DNA, 609 bp, Homo sapiens
ccgctaagacccggagaacggaatttcactttgaaattcccttgcctcgtgagggccggcgctgggcatgctcagtagccgcggcgctgctgctgggctgctgggctggcgcggagtccaccctgccgtctccgccttggcttctgggcgtccagaaggccaggcatttgccgcctctgagcgcttctgttccccttacccgcaacctcctactgctcttcctctctccctctcttagggaggttgaagctggtgctggtttctgtcggcgccacagactgactgctctgcaaaccccagccgaggacctgaatcccggagactagaagacccttggcggtggctctttctaatagcactttacctgaagtggggtcgtggtggagtttctcctccacctctcaatgcaaacactatgcggagagcagtctgcttccctgcgctgtgcctgctccttaatcttcacgctgcaggtaaggggttgccaggcttagagccggagctgtgcatgagatgggaaactgcacatgcttaaggactctaggaaaagcttgccttgcgaagaaagcctttctaaaaaggtaaaacaggacagtacctgacagggaa

SEQ ID NO: 823 - DNA, 1688 bp, Homo sapiens
aagggtggagaagagggaaggcgaaggacgcgcgttcccgggctcgtgaccgccagcggcccggggaacccgctcccagacagactcggagagatggcaggcggaagacaccggcgcgtcgtgggcaccctccacctgctgctgctggtggccgccctgccctgggcatccaggggggtcagtccgagtgcctcagcctggccagaggagaagaattatcaccagccagccattttgaattcatcggctcttcggcaaattgcagaaggcacctatctctgaaatgtggcaaaatgacttacagccattgctgatagagcgatacccgggatcccctggaagctatgctgctcgtcagcacatcatgcagcgaattcagaggcttcaggctgactgggtcttggaaatagacaccttcttgagtcagacaccctatgggtaccggtctttctcaaatatcatcagcaccctcaatcccactgctaaacgacatttggtcctcgcctgccactatgactccaagtatttttcccactggaacaacagagtgtttgtaggagccactgattcagccgtgccatgtgcaatgatgttggaacttgctcgtgccttagacaagaaactcctttccttaaagactgtttcagactccaagccagatttgtcactccagctgatcttcttgatggtgaagaggcttttcttcactggtctcctcaagattctctctatgggtctcgacacttagctgcaaagatggcatcgaccccgcacccacctggagcgagaggcaccagccaactgcatggcatggatttattggtcttattggatttgattggagctccaaacccaacgtttcccaatttttttccaaactcagccaggtggttcgaaagacttcaagcaattgaacatgaacttcatgaattgggtttgctcaaggatcactctttggaggggcggtatttccagaattacagttatggaggtgtgattcaggatgaccatattccatttttaagaagaggtgttccagttctgcatctgataccgtctcctttccctgaagtctggcacaccatggatgacaatgaagaaaatttggatgaatcaaccattgacaatctaaacaaaatcctacaagtctttgtgttggaatatcttcatttgtaatactctgatttagtttaggataattggttctagaattgaattcaaaagtcaaggcatcatttaaaataatctgatttcagacaaatgctgtgtggaaacatctatcctatagatcatcctattcttatgtgtctttggttatcagatcaattacagaataattgtgttgtgatattgtgtcctaaattgctcattaatttttatttacagattgaaaaagagggaccgtgtaaagaaaatggaaaataaatatctttcaaagactcttttagataaacacgatgaggcaaaatcaggttcattcattcaacgatagtttctaaacagtacttaaatagcggttggaaaacgtagccttcattttatgattttttcatatgtggaaatctattacatgtaatacaaaacaaacatgtagtttgaaggcggtcagatttctttgagaaatctttgtagggttaattttatggaaattaaaatcagaattaaatgctaaaaaaaaaaaaaaaaaa

SEQ ID NO: 824 - DNA, 2333 bp, Homo sapiens
acgagcagcgacgcccctggtcccacagataccactgcctcccgccctttcgctcctcggccgcgcaatgggcacccgcgacgacgagtacgactacctctttaaagttgtccttattggagattctggtgttggaaagagtaatctcctgtctcgatttactcgaaatgagtttaatctggaaagcaagagcaccattggagtagagtttgcaacaagaagcatccaggttgatggaaaaacaataaaggcacagatatgggacacagcagggcaagagcgatatcgagctataacatcagcatattatcgtggagctgtaggtgccttattggtttatgacattgctaaacatctcacatatgaaaatgtagagcgatggctgaaagaactgagagatcatgctgatagtaacattgttatcatgcttgtgggcaataagagtgatctacgtcatctcagggcagttcctacagatgaagcaagagcttttgcagaaaagaatggtttgtcattcattgaaacttcggccctagactctacaaatgtagaagctgcttttcagacaattttaacagagatttaccgcattgtttctcagaagcaaatgtcagacagacgcgaaaatgacatgtctccaagcaacaatgtggttcctattcatgttccaccaaccactgaaaacaagccaaaggtgcagtgctgtcagaacatctaaggcatttctcttctcccctagaaggctgtgtatagtccatttcccaggtctgagatttaaatatatttgtaattcttgtgtcacttttgtgttttattacttcatacttatgaatttttccatgtcctaagtcttttgattttagctttataaaatcatccacttctcccgaatgactgcagctttttttcatgctatggcttcactagccttagtttaataaactgaatgtttggattcctcagttattgtttacttttcatcatggaagcctgtcactgtatgtaggacataatagaacttatcacttgaagctcagcctattggtcttgatcaaatcaaactaagaagaccttagaaataagctaccattttgccacagagcagcttataggtaatacactcttctctcagtgcagtgtacatttccacaaatctaagaattgccctataaacatagcagggattttgagagcttgaaaattttccattattctggacatgaatttctaaaatgccttaataggtttatgtagttgagtaaattttgttttttaatttttgtaagcatcaaagttgattagagaggggggcactttttctggagaattctcttagtaaacacaaaagattgttacggtttcattagtagtatggttgtggggccataagttaaacagtgctgcctggtaggctgggaactgaagagacttgtggtattccatctcgggtgcctctgttggcaatgatcaggcagcccaaaagatttaaatgatctataataatttccaagcggtagattatgtggcattttattgctcaggcaataattggtttaatgctggtagtgtcaaattttgaagtgttaattttgtcttaggaccttccagtaagtgaaatacaacctagttttatcaccatatccaccagcaggcatccataattattttaacaatgctaatatttgagttttgcagtatattatagaataatatagtccagttaaatctttggtttcagtatgtctgaagagtacagtgagaggttaattttctgctcaagtggtaccacttaaaggcatgtattcttttagtatgtaaaatgaaatagtaccttgagtttaaatagaatgcatttaggcattgtagagatctgaaatagttttcttccactgcgttgttgaaatcaatgaagcaattagtttctcattcagaaatgtgcacactaatatttagttttgctttctcgtggataatattaagcacttactctgcagtttctggaagttgtgtcaactgcagtgatactattcaggatggtgggaaatccccaaaaatatgtatcttttggcttgcttagattactatatttcatagttaatcttttgtctcttgcggtgctcatgatgtgtggggcacacggaaggcattgctgtagtcagtcattttggttttcttctatagccattttattattttagtgtattagttatgaagataatattatctatttgtaaattgctactttgtattttatgcatgctctgtaatttgatttttttttagttattgatttggattatattcacattctaataaacagttatagggggatt

SEQ ID NO: 825 - DNA, 2666 bp, Homo sapiens
ctttctgtctgtgccggtcactcacccgtcccttcctgttccatacagctctcctccctgcttcttggccatgtcctggtttattctgctttgggctgtggttcctgtcctcctgccagctcctgtctcctgcccctcttgccttgctggccccccgctatctcagcctggggggccaccacagggctctaaacagcgctttgcattcccaagacacctgctgccacacaagccagtgactggtgacgtcccttggttcgggccctgcccgctccacctttagtatttcccagtctcaggagcgtggctgcacctgagtctccctgaggccccgaacttagacacagaagtccagctgattgccttccatccctctgacccctccaggcctgctgctgcttctgtgtttccctgtttgagggtttgctgtgtgagccatgaagctgtgttctttttttaaagcaactttattgaggtacaattgaaatacagtcattgtttaaagtgtacaatttgatcagtttcaacatctgtaaatacccatgaaactatcaccatagtcatctccccgaaaggtttttgtgtatattactgtaatcttcccttacgcacacacaaaaccatgggtctgttttctggcattatggactagtctgaattttctagaattttatataagtggagccctacgctacattttcccctcgccccagcttctttccctcagcataaggattttgaaattcacccatgctgttgagtgaatcacttgtccgttacttttcagtgctgggtagtattcccgggtggggtgtgccatttgtttatccattcacctgtgtaagccatgcactcagttttgtgacaagagtgtacttttttggttctgcctggctgggggtggacaggctgtggcgtgcgtggagcccgaggcctcagctcccacatcgggctcttcattgaatctcctctttgcatactcatcccagcagctgcatcaaaattctgcattttaacttaaatgacgcgggactctatacgttatacgcgttaaaaaatgtagtaaattgaaagcagtgagaaaggtaattgctttgagtgctgtttaaaaattgaagtaaaatctcattcatttaagcagttaatgtcagcttattgtgggggttacataaattagcatctttttagtttaaaagagaaatttgcttcaggggtttttcattgttcttagttcaaggacagttatctccagtgcaaagtcatgatcacatatgattgatgttattagcttgctgcttgagttactgttcagaaaaactacactttgtatattatgagagttagtggtcactgttgagcaaaacttctagagctttcttggcatgcctgttgggaagagaataaaaatgtgtcatcagagtacaggtgacagagtgcacccagcgccatgccccacctccctcttccagtcctttggcccacctgcggctcctgcctgctgtctttcttccggatcatctgcctggcccaccccactcacctctcttcttaaaacttaaatgtgatcacatcactgacctgcctacagcctccttttccctggggaataacgttcaaaggcctccctctgccattcacagccctgtagtctggcctcatcctgatttcgggggtctttcgatgctgtatagccctgcatcccctccggtgtgggcccgggcagacgtgcacacctccgcacacacctctggctcactcaccaccgttcatgcctctgctgtgctccgtgtctgttgctccttccatgtggggcggggtgtcctccttcatccccatgataccccgcaggtcagaagtcctcctttctgtgaagcattctcaggtcagaactaattctgaccaagggacccaaggcagttatcctggcgttaaagtcctggggtgttaaaagggggctcagtgttgaaaaggaactcacaggttcctactcacagactctctcagtaggacattgatgacacactggtaccaaccacatccttaggcctttctctgaggactgaagttctgcttcgcatttgactttatctttgttgttttatttctctgagagattatatgtttccagtattgtagcacaggacttcacctagaaaaagcacctacaaatgctaactttcttttgaataataagatcattggtgttttttgctctctttagggacatgaattttataatccccagaaaaaaaaaattacattttcctgcgtaatgcagccgaagagctaaagcccaggaataagaagtagtggctggagactctggctcagccagagttgtttctctccactctgcctcatctctgtacgaatttgggtcccagccttgttgggttgtcagccatggacatggatttcaacccctggagaaaacgatgtcattgttcagcagctgagagcccaggcgtccgcggcgacttgccgtctctccattccactgcctgttgcagagtttttctgtaactaagggggttgaggttattgtagacgttagattgcgggcaccgccagggattttgcagcgcttcagtgtacgtgttagagaatattggaaaagcgtctgtgagccccgtgctgtattttgtaataaagtcttttgcagattg

SEQ ID NO: 826 - DNA, 2770 bp, Homo sapiens
atcgaaggcgagatggcggacgtgctagatcttcacgaggctgggggcgaagatttcgccatggatgaggatggggacgagagcattcacaaactgaaagaaaaagcgaagaaacggaagggtcgcggctttggctccgaagaggggtcccgagcgcggatgcgtgaggattatgacagcgtggagcaggatggcgatgaacccggaccacaacgctctgttgaaggctggattctctttgtaactggagtccatgaggaagccaccgaagaagacatacacgacaaattcgcagaatatggggaaattaaaaacattcatctcaacctcgacaggcgaacaggatatctgaaggggtatactctagttgaatatgaaacatacaaggaagcccaggctgctatggagggactcaatggccaggatttgatgggacagcccatcagcgttgactggtgttttgttcggggtccaccaaaaggcaagaggagaggtggccgaagacgcagcagaagtccagaccggagacgtcgctgacaggtcctctgttgtccaggtgttctcttcaagattccatttgaccatgcagccttggacaaataggactggggtggaacttgctgtgtttatatttaatctcttaccgtatatgcgtagtatttgagttgcgaataaatgttccatttttgttttctacatttaatgttactttcctgtcctaaaattgaaagttctaaagcatagcaaggctgtatggatcattgtgaagatacttctagggactgaactctatgtatttcttttttttcttttttttgagatagagtcttgctgtgttacccagggtggattgcagctgatcatagctcactgcagcttcaaactcttgggctcaagccatccttctgcctcactgtccctagtagttgggattacaggcacatgccaccatgcccagctaaatttttaatatttttgtagagatggggtcttgctgtgttacctgggctagttatgtgagtttctatattagacatagtctcaagtttcaggtagggtttaaagtagagacactggtcagtatttcttttttggggggaactaggagagcaggagtagaagtgagatgttaagatcttatggcactaaagacttactattctgttcctacatactctgttaggatcagatagatgttatagaaatgccttttgtttctcctgcccttcttgatgtcacagttttttgtacttccagctgtctaaaggcatgaatctcctcttggagcattctcccagacccttctttagaagagtctatactaagttcttggtgccctcttcggcagccaagggtgaaggccccatagaggagaggatccaaaggagcattgaggaggcccaagaggaaaaggatgtggctcaggctgggagggacttcagttagcatggtgggggagaaccagtaccacatacccagtaggtaataaggtgtccagcagaggatgaaggtcagcaagataagcagggccagtctcagggcccggagacgaacacggggacaattgtcaaaggagcgggggagggcaaattcaccagcaggggctaggaatttagaaaatatactgtaattcagacactcagcttctgatctgagtatagggtgaattgatggaggggcatagctagtgagacagagctcgcctcctacaaggaggagaatgttgcaaaccgttttccccttcccaacctgggactatatgatttcttacccccagggattatgatagaaatatgaagccaccaagtctagacttgatggtgttcaagaataaataatactgattgcctccctagtccttgtccagctaactcagctgtttataattgaagggattcaacaaaattatctctagcatcaggtgctagacatggttagaatctcaccatggtttagtgactggtagatagctattaggtaggtagataaataaatgatgctagaggcaacaggtctagggttaaggattaaggcctgggaattggagtctcaccatggctccccttccttgtctggggcctggacacactgaggacaatgcggctatagcagatggccatggcagtcagtggcagcagaaagaggcagcagaaggtgaagaggttataggtggtctcttgccattgagccttgaagctgcctttggtgacacactgagtgaaagggactgggccagctcagtggaccgtgtggaacaggaacagctggagtggagttgaggactattagaactggttcccctcaccacccaacctacccacctatgtcatactgtctcctcccaattcatccttaattccaagtgaagcagcacagtgctgagaaacagttcatccatggtgccatgttaaagaagttggaaatatatcttgaaaatcctatcttccttttaggcttgaatatgatgctgaacagtaagtttgttaaatcttggaacttaaaacaatcctgctttctcaagtactattctaacattgcgctttataagggatgatatttctaccacctcactcatatttttagctgaaatgattttcctggtatgtctgttattttgtggaaaaagaaatattgtgtaaaatgggtgctgccaaaattccaggccattttgcagggactctgaagtgacctttagtagtaatagtcttatgtgcagtaactataatggtaaagaatgttaaataataaaatttaacattttccaaatgct

SEQ ID NO: 827 - DNA, 1449 bp, Homo sapiens
atggtggagaagggccccgaggtctcagggaagcggagagggaggaacaacgcggccgcctccgcctccgccgccgccgcctccgccgccgcctcggccgcctgcgcctcgccagccgccactgccgcctcgggcgccgccgcctcctcagcctcggccgccgccgcctcagccgccgccgcccccaataatggccagaataaaagtttggcggcggcggcgcccaatggcaacagcagcagcaactcctgggaggaaggcagctcgggctcgtccagcgacgaggagcacggtggcggtggcatgagggtcggaccccagtaccaggcggtggtgcccgacttcgaccccgccaaactggcaagacgcagtcaagaacgggacaatcttggcatgttggtctggtcacccaatcaaaatctgtcagaagcaaagttggatgaatacattgccattgccaaagaaaagcatgggtacaacatggaacaggctcttgggatgctcttctggcataaacataatatcgaaaagtcattggctgatttgcccaactttacccctttcccagatgagtggactgtggaagataaagtcttatttgagcaagcctttagttttcatgggaaaacttttcatagaatccaacaaatgcttccagataaatctatagcaagtctggtgaaattttactattcttggaagaagacgaggactaaaactagtgtgatggatcgccatgcccggaaacaaaaacgggagcgggaggagagcgaggatgaactggaagaggcaaatggaaacaatcccattgacattgaggttgatcaaaacaaggaaagcaaaaaggaggttccccctactgagacagttcctcaggtcaaaaaagaaaaacatagcacacaagctaaaaatagagcaaaaaggaaacctccaaaaggaatgtttctttctcaagaagatgtggaggctgtttctgccaatgccactgctgctaccacggtgctgagacaactagacatggaattggtttcagtcaaacgacagatccagaatattaaacagacaaacagtgctctcaaagaaaaacttgatggtggaatagaaccatatcgacttccagaggtcattcagaaatgtaatgcacgttggactacagaagagcagcttctcgccgtacaagccatcaggaaatatggccgagattttcaggcaatctcagacgtgattgggaacaaatcagtggtacaagtgaaaaacttttttgtaaattatcgacgccgcttcaacatagatgaagttttacaagaatgggaggcagaacatggtaaagaagagaccaatgggcccagtaaccagaagcctgtgaagtccccagataattccattaagatgcccgaagaggaagacgaggctcctgttctggatgtcagatatgcatctgcctcctga

SEQ ID NO: 828 - DNA, 2696 bp, Homo sapiens
gccgcctccccggccccctccccggaaccggcggtcgagctacggtcgcggagcagtggaaccgagactgccccgcggagccgccgctagacttcgggctccttgaggatattcagttttgtatgtttgaatatcctctcaccatgttcagcataaagtaccattcttaatgattatcctcaacaagacaggtgtgagagggttgctgttgtattgcaatcatggtgcagaaataccagtccccagtgagggtgtacaaatacccctttgaattaattatggctgcctatgaaaggaggttccctacatgtcctttgattccgatgttcgtgggcagtgacactgtgaatgaattcaagagcgaagatggggctattcatgtcattgaaaggcgctgcaagctggatgtagatgcacccagactgctgaagaagattgcaggagttgattatgtttattttgtccagaaaaactcactgaattctcgggaacgtactttgcacattgaggcttataatgaaacgttttccaatcgggtcatcattaatgagcattgctgctacaccgttcaccctgaaaatgaagattggacctgttttgaacagtctgcaagtttagatattaaatctttctttggttttgaaagtacagtggaaaaaattgcaatgaaacaatataccagcaacattaaaaaaggaaaggaaatcatcgaatactaccttcgccaattagaagaagaaggcataacctttgtgccccgttggagtccgccttccatcacgccctcttcagagacatcttcatcatcctccaagaaacaagcagcgtccatggccgtcgtcatcccagaagctgccctcaaggaggggctgagtggtgatgccctcagcagccccagtgcacctgagcccgtggtgggcacccctgacgacaaactagatgccgactacatcaagagatacctgggcgatttgactccgctgcaggagagctgcctcattagacttcgccagtggctccaggagacccacaagggcaaaattccaaaagatgagcatattcttcggttcctccgtgcacgggattttaatattgacaaagccagagagatcatgtgtcagtctttgacgtggagaaagcagcatcaggtagactacattcttgaaacctggacccctcctcaggtccttcaggattactacgcgggaggctggcatcatcacgacaaagatgggcggcccctctacgtgctcaggctggggcagatggacaccaaaggcttggtgagagcgctcggggaggaagccctgctgagatacgttctctccataaatgaagaagggctaaggcgatgcgaagagaatacaaaagtctttggtcggcctatcagctcatggacctgcctggtggacttggaagggctgaacatgcgccacttgcggagacctggtgtgaaagcgctgctgcggatcatcgaggtggtggaggccaactaccctgagacactgggccgccttctcatcctgcgggcgcccagggtatttcctgtgctctggacgctggttagtccgttcattgatgacaacaccagaaggaagttcctcatttatgcaggaaatgactaccagggtcctggaggcctgctggattacatcgacaaagagattattccagatttcctgagtggggagtgcatgtgcgaagtgccagagggtggactggtccccaaatctctgtaccggactgcagaggagctggagaacgaagacctgaagctctggactgagaccatctaccagtctgcaagcgtcttcaaaggagccccacatgagattctcattcagattgtggatgcctcgtcagtcatcacttgggatttcgacgtgtgcaaaggggacattgtgtttaacatctatcactccaagaggtcgccacaaccacccaaaaaggactccctgggagcccacagcatcacctctccgggtgggaacaatgtgcagctcatagacaaagtctggcagctgggccgcgactacagcatggtggagtcgcctctgatctgcaaagaaggagaaagcgtgcagggttcccatgtgaccaggtggccgggcttctacatcctgcagtggaaattccacagcatgcctgcgtgcgccgccagcagccttccccgggtggacgacgtgcttgcgtccctgcaggtctcttcgcacaagtgtaaagtgatgtactacaccgaggtgatcggctcggaggatttcagaggttccatgacgagcctggagtccagccacagcggcttctcccagctgagtgccgccaccacctcctccagccagtcccactccagctccatgatctccaggtagtgccgcgctgcctgcacctagtgtgcagaggggacggccgcccctcctcggacagccagctgcacccgcccacccagcggcgacattgtacagactcctctcacctctagatagcaaatagctctcagatggtaaacgtagtcgtttgatcccaaaactaccttggcaggtagttttaactctgatcctaacttaactcaatagccatagattttgtatacgttgtgcacaaaatccaaccagagcgcaagggctctcttgaaagaaaagtagtttctgtaccaattaaaggattgacgtggtctcagaaaaaaaaaaaaaaaaaaa

SEQ ID NO: 829 - DNA, 2382 bp, Homo sapiens
ggtctttgagcgctaacgtctttctgtctccccgcggtggtgatgacggtgaaaactgaggctgctaagggcaccctcacttactccaggatgaggggcatggtggcaattctcatcgctttcatgaagcagaggaggatgggtctgaacgactttattcagaagattgccaataactcctatgcatgcaaacaccctgaagttcagtccatcttgaagatctcccaacctcaggagcctgagcttatgaatgccaacccttctcctccaccaagtccttctcagcaaatcaaccttggcccgtcgtccaatcctcatgctaaaccatctgactttcacttcttgaaagtgatcggaaagggcagttttggaaaggttcttctagcaagacacaaggcagaagaagtgttctatgcagtcaaagttttacagaagaaagcaatcctgaaaaagaaagaggagaagcatattatgtcggagcggaatgttctgttgaagaatgtgaagcaccctttcctggtgggccttcacttctctttccagactgctgacaaattgtactttgtcctagactacattaatggtggagagttgttctaccatctccagagggaacgctgcttcctggaaccacgggctcgtttctatgctgctgaaatagccagtgccttgggctacctgcattcactgaacatcgtttatagagacttaaaaccagagaatattttgctagattcacagggacacattgtccttactgacttcggactctgcaaggagaacattgaacacaacagcacaacatccaccttctgtggcacgccggagtatctcgcacctgaggtgcttcataagcagccttatgacaggactgtggactggtggtgcctgggagctgtcttgtatgagatgctgtatggcctgccgcctttttatagccgaaacacagctgaaatgtacgacaacattctgaacaagcctctccagctgaaaccaaatattacaaattccgcaagacacctcctggagggcctcctgcagaaggacaggacaaagcggctcggggccaaggatgacttcatggagattaagagtcatgtcttcttctccttaattaactgggatgatctcattaataagaagattactcccccttttaacccaaatgtgagtgggcccaacgacctacggcactttgaccccgagtttaccgaagagcctgtccccaactccattggcaagtcccctgacagcgtcctcgtcacagccagcgtcaaggaagctgccgaggctttcctaggcttttcctatgcgcctcccacggactctttcctctgaaccctgttagggcttggttttaaaggattttatgtgtgtttccgaatgttttagttagccttttggtggagccgccagctgacaggacatcttacaagagaatttgcacatctctggaagcttagcaatcttattgcacactgttcgctggaagctttttgaagagcacattctcctcagtgagctcatgaggttttcatttttattcttccttccaacgtggtgctatctctgaaacgagcgttagagtgccgccttagacggaggcaggagtttcgttagaaagcggacgctgttctaaaaaaggtctcctgcagatctgtctgggctgtgatgacgaatattatgaaatgtgccttttctgaagagattgtgttagctccaaagcttttcctatcgcagtgtttcagttctttattttcccttgtggatatgctgtgtgaaccgtcgtgtgagtgtggtatgcctgatcacagatggattttgttataagcatcaatgtgacacttgcaggacactacaacgtgggacattgtttgtttcttccatatttggaagataaatttatgtgtagacttttttgtaagatacggttaataactaaaatttattgaaatggtcttgcaatgactcgtattcagatgcttaaagaaagcattgctgctacaaatatttctatttttagaaagggtttttatggaccaatgccccagttgtcagtcagagccgttggtgtttttcattgtttaaaatgtcacctgtaaaatgggcattatttatgtttttttttttgcattcctgataattgtatgtattgtataaagaacgtctgtacattgggttataacactagtatatttaaacttacaggcttatttgtaatgtaaaccaccattttaatgtactgtaattaacatggttataatacgtacaatccttccctcatcccatcacacaactttttttgtgtgtgataaactgattttggtttgcaataaaaccttgaaaaatatttaaacaaaaaaaaaaaaaaaaaaaaaaaaa

SEQ ID NO: 830 - DNA, 1652 bp, Homo sapiens
ttccatcctaatacgactcactatagggctcgggtggccgcccgggcaggtgcttaacggtcctctggtctctctctcccctcagctgagtcccttccctgtctttcactcttctggcatcggtggttttacttcttcgattgaaccctgcttcctcgacccccctgggaggccgccttcttcaggcgcctcccttctctccacgagctcgctctgacagctgaggaactggcaagatcctgctacccagagggtgaatgggtatctttcccggaataatcctaatttttctaagggtgaagtttgcaacggcggccgtgattgtaagcggacaccagaaaagtaccactgtaagtcatgagatgtctggtctgaattggaaaccctttgtatatggcggccttgcctctatcgtggctgagtttgggactttccctgtggaccttaccaaaacacgacttcaggttcaaggccaaagcattgatgcccgtttcaaagagataaaatatagagggatgttccatgcgctgtttcgcatctgtaaagaggaaggtgtattggctctctattcaggaattgctcctgcgttgctaagacaagcatcatatggcaccattaaaattgggatttaccaaagcttgaagcgcttattcgtagaacgtttagaagatgaaactcttttaattaatatgatctgtggggtagtgtcaggagtgatatcttccactatagccaatcccaccgatgttctaaagattcgaatgcaggctcaaggaagcttgttccaagggagcatgattggaagctttatcgatatataccaacaagaaggcaccaggggtctgtggaggggtgtggttccaactgctcagcgtgctgccatcgttgtaggagtagagctaccagtctatgatattactaagaagcatttaatattgtcaggaatgatgggcgatacaattttaactcacttcgtttccagctttacatgtggtttggctggggctctggcctccaacccggttgatgtggttcgaactcgcatgatgaaccagagggcaatcgtgggacatgtggatctctataagggcactgttgatggtattttaaagatgtggaaacatgagggcttttttgcactctataaaggattttggccaaactggcttcggcttggaccctggaacatcattttttttattacatacgagcagctaaagaggcttcaaatctaagaactgaattatatgtgagcccagccctgccagcctttctactcctttgcccttttcccgtgttctaatgtattttgacaatgttgtaagtgtttaccaagccgttggtctcctaagggcctcctgatggaagaacagtggggtggttcaaagttatttctatgtttgtgttaccatgttaacttttccccgagagaaagtgttaacattgagactctggccccagattggtatcttctatgaagatggatactgatgggtgacattgaaaacggcctgctttccaaatgtggttaaatgtaattggttagccccagacttgggctagagcagaaggcataggccagggtggttattgctatatgtgttacagacctcggttctcattaaagtatttattggcagaatcacaaaaaa

SEQ ID NO: 831 - DNA, 1804 bp, Homo sapiens
gaccatcccagacgccggagcccgagccccgacgagtccccgcgcctcatccgcccgcgtccggtccgcgttcctccgccccaccatggctcggggccccggcctcgcgccgccaccgctgcggctgccgctgctgctgctggtgctggcggcggtgaccggccacacggccgcgcaggacaactgcacgtgtcccaccaacaagatgaccgtgtgcagccccgacggccccggcggccgctgccagtgccgcgcgctgggctcgggcatggcggtcgactgctccacgctgacctccaagtgtctgctgctcaaggcgcgcatgagcgcccccaagaacgcccgcacgctggtgcggccgagtgagcacgcgctcgtggacaacgatggcctctacgaccccgactgcgaccccgagggccgcttcaaggcgcgccagtgcaaccagacgtcggtgtgctggtgcgtgaactcggtgggcgtgcgccgcacggacaagggcgacctgagcctacgctgcgatgagctggtgcgcacccaccacatcctcattgacctgcgccaccgccccaccgccggcgccttcaaccactcagacctggacgccgagctgaggcggctcttccgcgagcgctatcggctgcaccccaagttcgtggcggccgtgcactacgagcagcccaccatccagatcgagctgcggcagaacacgtctcagaaggccgccggtgacgtggatatcggcgatgccgcctactacttcgagagggacatcaagggcgagtctctattccagggccgcggcggcctggacttgcgcgtgcgcggagaacccctgcaggtggagcgcacgctcatctattacctggacgagattcccccgaagttctccatgaagcgcctcaccgccggcctcatcgctgtcatcgtggtggtcgtggtggccctcgtcgccggcatggccgtcctggtgatcaccaaccggagaaagtcggggaagtacaagaaggtggagatcaaggaactgggggagttgagaaaggaaccgagcttgtaggtacccggcggggcaggggatggggtggggtaccggatttcggtatcgtcccagacccaagtgagtcacgcttcctgattcctcggcgcaaaggagacgtttatcctttcaaattcctgccttccccctcccttttgcgcacacaccaggtttaatagatcctggcctcagggtctcctttctttctcacttctgtcttgaaggaagcatttctaaaatgtatcccctttcggtccaacaacaggaaacctgactggggcagtgaaggaagggatggcatagcgttatgtgtaaaaaacaagtatctgtatgacaacccgggatcgtttgcaagtaactgaatccattgcgacattgtgaaggcttaaatgagtttagatgggaaatagcgttgttatcgccttgggtttaaattatttgatgagttccacttgtatcatggcctacccgaggagaagaggagtttgttaactgggcctatgtagtagcctcatttaccatcgtttgtattactgaccacatatgcttgtcactgggaaagaagcctgtttcagctgcctgaacgcagtttggatgtctttgaggacagacattgcccggaaactcagtctatttattcttcagcttgcccttactgccactgatattggtaatgttcttttttgtaaaatgtttgtacatatgttgtctttgataatgttgctgtaataaaatatgggaaaggcacaaaaaaaaaaaaaaaaaaaa

SEQ ID NO: 832 - DNA, 2912 bp, Homo sapiens
gcggcctcccgctccagcccggctcattccgcacattccggccagccccctccccacgaccccccttccccggccccccttgcggctccctcgggcccggcggagcggcccggccggagcgcccccgcgagctcggaccaggctcagccgcccagtgggctcaggcccagagcccagagcaaccagcacaatagcgtccaacagctggaacgccagcagcagccccggggaggcccgggaggatgggcccgagggcctggacaaggggctggacaacgatgcggagggcgtgtggagcccggacatcgagcagagcttccaggaggccctggccatctacccgccctgcggccggcggaagatcatcctgtcagacgagggcaagatgtacggccgaaatgagttgattgcacgctatattaaactgaggacggggaagactcggacaagaaaacaggtgtccagccacatacaggttctagctcggaagaaggtgcgggagtaccaggttggcatcaaggccatgaacctggaccaggtctccaaggacaaagcccttcagagcatggcgtccatgtcctctgcccagatcgtctctgccagtgtcctgcagaacaagttcagcccaccttcccctctgccccaggccgtcttctccacttcctcgcggttctggagcagcccccctctcctgggacagcagcctggaccctctcaggacatcaagccctttgcacagccagcctaccccatccagccgcccctgccgccgacgctcagcagttatgagcccctggccccgctcccctcagctgctgcctctgtgcctgtgtggcaggaccgtaccattgcctcctcccggctgcggctcctggagtattcagccttcatggaggtgcagcgagaccctgacacgtacagcaaacacctgtttgtgcacatcggccagacgaaccccgccttctcagacccacccctggaggcagtagatgtgcgccagatctatgacaaattccccgagaaaaagggaggattgaaggagctctatgagaaggggccccctaatgccttcttccttgtcaagttctgggccgacctcaacagcaccatccaggagggcccgggagccttctatggggtcagctctcagtacagctctgctgatagcatgaccatcagcgtctccaccaaggtgtgctcctttggcaaacaggtggtagagaaggtggagactgagtatgccaggctggagaacgggcgctttgtgtaccgtatccaccgctcgcccatgtgcgagtacatgatcaacttcatccacaagctgaagcacctgcccgagaagtacatgatgaacagcgtgctggagaacttcaccatcctgcaggtggtcacgaaccgggactcccaggaraccctgcttgtcattgcttttgtcttcgaagtctccaccagtgagcacggggcccagcaccatgtctacaagctcgtcaaagactagggtgccctctgcgcctccttaaggatgcagggtgagcatctcctctccacacctgcctggcacccctgggggggtccaggattgaggattcatctacctgccaggcctcaggcccaggacccaggaggcctccccacctaccccagcacacacactccctgccactgttctgcgctttaattgtgggagaagagaggagaggagggctcagcggtggggcagcctgtccggggcgctgacccaccatcaccctgctctgcccagcctcgcgtgacctcagagaggtggggataggggacaccttcagcctccagcatgtgtggccactgtacccccacccacccttgggggagcatgatgggcaggtgagggcaggatggagaccaagggagtcagtgagcagaggccctgggagtgtccggtcggggttggactgaggacagargggcccacacttccttgcccctttgtgtcccaggcctggtgcccagactccttgcatggcttgtgtggtcctcagactccgcacagcgagcgtaggtctctgggtttcagatgaagtgcccaggctccaggaagttgagggacccacagggagaggtgggcagagctggagttctcatccagggctgcttgtccccagagcccaggtttatactacctccctggggcgggggctggccgcagggtaggggagagactctgcagtgtggagtggagcctcatcgaggggcgctgggttaggggagcacctgtttcagactgggcatgaagaagggagcacagcaggtactagaccccattagcacytcagcccacaagccagccagggcccaggaagatggggcaccccccagcaccttccagattgagagcaaggtagaggaaggagtcccagcttttgggcagaccagaggcccagagggagagagtagcagaaggcttttgatttttttyttgcctgaggcttgaatctgacaaacccttggtgggcactgttcccttaggtttttccccacctcaatttacctgcctagagtagcagytcccagacccagttytgggactgaaggttaacccttcacctgctgtccctttttaacacccaggcccccagagccagctgggcctgtccagcagccacctgtgggtatttatgagtttcatatgaagtactgtgccccttcccttcttcatcccgaccctgcccgagyttcctgaaggtcctcactgtttgcatatcgctcaggccacctccaaaccccacctaggttttataatgtatattatatatttttttgtgtatttttaaaatccagctgtgatgggttatatcataaatgcagcttggggttggagcaggggccctcaaaggcccagttcctgttcaaaaaaaaaaaaaaaaaaaaaaaaa

SEQ ID NO: 833 - DNA, 881 bp, Homo sapiens
gtaatgcatccaggaagcctggaggcctgtggtttccgcacccgctgccacccccgcccctagcgtggacatttatcctctagcgctcaggccctgccgccatcgccgcagatccagcgcccagagagacaccagagaacccaccatggccccctttgagcccctggcttctggcatcctgttgttgctgtggctgatagcccccagcagggcctgcacctgtgtcccaccccacccacagacggccttctgcaattccgacctcgtcatcagggccaagttcgtggggacaccagaagtcaaccagaccaccttataccagcgttatgagatcaagatgaccaagatgtataaagggttccaagccttaggggatgccgctgacatccggttcgtctacacccccgccatggagagtgtctgcggatacttccacaggtcccacaaccgcagcgaggagtttctcattgctggaaaactgcaggatggactcttgcacatcactacctgcagtttcgtggctccctggaacagcctgagcttagctcagcgccggggcttcaccaagacctacactgttggctgtgaggaatgcacagtgtttccctgtttatccatcccctgcaaactgcagagtggcactcattgcttgtggacggaccagctcctccaaggctctgaaaagggcttccagtcccgtcaccttgcctgcctgcctcgggagccagggctgtgcacctggcagtccctgcggtcccagatagcctgaatcctgcccggagtggaagctgaagcctgcacagtgtccaccctgttcccactcccatctttcttccggacaatgaaataaagagttaccacccagcaaaaaaaaaaaaaaa

SEQ ID NO: 834 - DNA, 2784 bp, Homo sapiens
gcggtgcggctgtgggagtcagcattggtaatagtgctgtgctgcggaagagtggagtctaaactttttcattgccagtgccccgaaactggagtgtgaaggaccgagacaagatgaagactgtgctcatggttgctgaaaagccgtccttggcacagtcaattgccaaaatcctctctagagggagcctgtcctcacacaaagggctgaacggggcctgctcagtccacgagtacactgggacctttgctggccagccagtgcgcttcaagatgacgtctgtctgtggtcacgtgatgaccctggatttcctgggaaaatacaacaaatgggacaaagtggaccccgcagaactgttcagccaagctcccacggagaagaaagaagctaaccccaagctgaacatggtgaagttcctgcaggtggagggcagaggctgcgactacatcgtgctgtggctggactgcgacaaggagggggagaacatctgctttgaggttcttgatgctgttctgcccgtcatgaacaaggcccatggtggcgagaagaccgtgttccgggccaggtttagctccatcacggacacagacatctgtaatgccatggcctgcctaggcgagcctgaccacaacgaggcgctctcagtggatgctcgccaggagctggacctgcgaatcggctgtgcattcaccaggtttcagactaaatatttccaggggaaatacggtgatttagacagctctctcatctcctttgggccgtgtcagactccaaccctgggattctgtgtggagagacatgataaaatccagtccttcaaaccagagacctactgggtgctgcaggccaaggttaacactgacaaagacagatctctccttttggactgggaccgagtaagagtgtttgaccgggagatcgcacagatgtttttaaacatgacaaagctggagaaggaagcccaggtggaggccacaagcaggaaagaaaaggccaagcagaggcccctggccctgaacactgtggagatgctgcgtgtggccagctcttctctgggcatggggccgcagcacgccatgcagacggctgagcggctctacacgcaaggctacatcagctacccacggacagagaccacccactaccctgagaactttgacctgaagggctctctgcggcagcaggccaaccacccctactgggccgacacggtgaagcggttgttagcagaaggtatcaaccgcccgcggaaaggccatgacgccggcgaccatccccccatcacccccatgaagtctgccacagaggccgaattagggggtgacgcgtggcggctctatgagtacatcaccagacacttcatcgccacggtcagccatgactgcaagtacctgcagagcaccatctccttcagaattgggcccgagctcttcacctgctccgggaagaccgtcctctcaccaggcttcacggaggtcatgccctggcagagcgtgcccctggaggagagcctgcccacttgccagcggggtgatgccttccctgtgggcgaggtgaagatgctggagaagcagacgaacccacccgactacctgacggaggccgagctcatcacgctcatggagaagcatggcatcggcacggatgccagcatccctgtgcatatcaacaacatctgccagcgcaactatgtcacggtggagagcgggcgccggctcaagcccaccaacctcggcatcgtcctggtgcacggctactataagattgatgcagagctggtgctccccaccatccgcagtgcagtggagaagcagctgaacctgatcgcccagggcaaggccgactaccgccaggtcctgggccacaccctggacgtgttcaagaggaagttccactactttgtcgactccattgctggcatggatgagttgatggaggtgtctttctcgcccctggcggccacaggcaagcccctctcacgctgtgggaagtgccaccgcttcatgaagtacatccaggccaagccaagccgcctgcactgctcccactgcgatgagacctacacgctcccccagaacggcaccatcaagctctacaaggagctccgctgccctctggatgacttcgagctggtcctgtggtcatcaggctctcggggcaagagctacccgctgtgcccctactgctacaaccacccacccttccgagacatgaagaaaggcatgggctgcaacgagtgtacgcacccctcctgccagcactcgctgagcatgctgggcatcggccagtgcgtggaatgtgagagcggggtgctggtgctggaccccacctcgggccccaagtggaaggtggcctgcaacaagtgcaacgtggtagcgcactgcttcgagaacgcccaccgcgtgcgggtgtccgccgacacctgcagtgtctgtgaggccgccttgcttgatgtggacttcaacaaggccaagtccccactcccgggcgatgagacgcagcacatgggctgcgtcttttgtgaccccgtcttccaggagctggtggagctgaagcatgcggcctcctgccaccccatgcaccgcggtggaccagggagaaggcagggtcgagggcggggccgggccaggaggccccctgggaagcccaaccccagacggcccaaggacaagatgtcagccctggccgcctactttgtatgatgaccctgtcctccctcacccaggctgcagtgccatgcagacacctcatggcacttcaaactattaaaatgcattttatctt

SEQ ID NO: 835 - DNA, 822 bp, Homo sapiens
gggggggagaaatgggacccatgggagggggagtcgtcatcccttacacaagaaatagccactttccttttgttgtcattcttgtgatcctgggtgggtttctgtggcactcttttagaacatgtagcatcatcttagaggtctatttttaaaaaatgtgttgaagaggaaaaaaccattctcacgatggggcttaagtcattgtccaggaataagattggcgtggtgcccatgacatcaccgtcactctgcctaaaagcactctagagctacttgttcacgtggagaggaaggatattttgcgaagcaacagccgcaggtggagagccctgttcacctgatagggtctagctgtgatagtaaatataataccgctgtttccttgggtacagatttgagtgttcatgtgatgagactgtaaacctcatttttcggttcctctgtttaaaaaaacatctgaaggatgaactaaggctgctggtgccctgagcaactgataatgcaaatgtggacaaagtgtctgttttctactctagcctgttcatatggaccaaatttcaacaaggaactcaaggaaaatttgtacctgccgtatttatgctttcatgtaaaaaagggttggggggaggggtgtctttttgcttttggtgaactttttttcaaaatcatttttccactgtttctgtctggttttaaaacaaattacagttttgtatggattttttaaatgtacattttggaacaaatgatcaaatattttctgaaataacaataaaaggcagaaaattatctaaaaaaaaaaaaaaaaaaaaaaaaaaaaaa

SEQ ID NO: 836 - DNA, 5618 bp, Homo sapiens
gttggctgatagttcaccttcaaatcttcaaattattataaaagaactgctttctatgcatcaccagcctgaccctgctcttaccaaggagtttgattaccttcccccagtggatagcaggtccagttcagggtttgtggggctgagaaatggtggtgcaacttgttatatgaatgcagtcttccagcagctgtatatgcaacctgggctccctgagtcattactttcagtggatgatgacacagacaatccagatgatagcgtgttttaccaagtgcagtctctctttggacatttaatggaaagcaagctgcagtactatgtacctgagaatttttggaagattttcaagatgtggaataaagaactttatgtgagagaacagcaggatgcatatgaattctttactagtctcattgatcagatggatgaatacctcaagaaaatggggagagaccaaatttttaagaatacatttcagggcatctactctgatcagaagatctgtaaagactgtcctcacagatatgagcgtgaagaagctttcatggctctcaatctaggagtgacttcttgtcagagtttggaaatttctttggaccaatttgttagaggagaagttctagaaggaagtaatgcgtactactgtgaaaagtgtaaagaaaagagaataacagtgaaaaggacctgtattaaatctttacctagcgtcttggtaattcacctaatgagatttgggtttgactgggaaagcggacgctccattaaatatgatgaacaaataaggtttccctggatgctaaacatggagccttacacagtttcaggaatggctcgccaagattcttcttctgaagttggggaaaatgggcgaagtgtggatcagggcggtggaggatccccacgaaaaaaggttgccctcacagaaaactatgaacttgtcggtgtcatcgtacacagtgggcaggcacacgcaggccactactattccttcattaaggacaggcgagggtgtggaaaaggaaagtggtataaatttaatgacacagttatagaagaatttgacctaaatgacgagaccctggagtatgaatgctttggaggagaatatagaccaaaagtttatgatcaaacaaacccatacactgatgtgcgccgaagatactggaatgcctatatgcttttctaccaaagggtgtctgatcagaactccccagtattaccaaagaaaagtcgagtcagcgttgtacggcaggaagctgaggatctctctctgtcagctccatcttcaccagaaatttcacctcagtcatcccctcggccccataggccgaacaatgaccggctgtctattcttaccaagctggttaaaaaaggcgagaagaaaggactgtttgtggagaaaatgcctgctcgaatataccagatggtgagagatgagaacctcaagtttatgaagaatagagatgtatacagtagtgattatttcagttttgttttgtctttagcttcattgaatgctactaaattaaagcatccatattatccttgcatggcaaaggtgagcttacagcttgctattcaattcctttttcaaacttatctacggacaaagaagaaactcagggttgatactgaagaatggattgctaccattgaagcattgctttcaaaaagttttgatgcttgtcagtggttagttgaatattttattagttctgaaggacgagaattgataaagattttcttactggagtgcaatgtgagagaagtacgagttgctgtggccaccattctggagaaaaccctagacagtgccttgttttatcaggataagttaaaaagccttcatcagttactggaggtactacttgctctgttggacaaagacgtcccagaaaattgtaaaaactgtgctcagtactttttcctgttcaacacttttgtacaaaagcaaggaattagggctggagatcttcttctgaggcattcagctctgcggcacatgatcagcttcctcctaggggccagtcggcaaaacaatcagatacgtcgatggagttcagcacaagcacgagaatttgggaatcttcacaatacagtggcgttacttgttttgcattcagatgtctcatcccaaaggaatgttgctcctggcatatttaagcaacgaccacccattagcattgctccctcaagccctctgttgcccctccatgaggaggtagaagccttgttgttcatgtctgaagggaaaccttacctgttagaggtaatgtttgctttgcgggagctgacaggctcgctcttggcactcattgagatggtagtgtactgctgtttctgtaatgagcatttttccttcacaatgctgcatttcattaagaaccaactagaaacggctccacctcatgagttaaagaatacgttccaactacttcatgaaatattggttattgaagatcctatacaagcagagcgagttaaatttgtgtttgagacagaaaatggattactagctttgatgcaccacagtaatcatgtggacagtagtcgctgctaccagtgtgtcaaatttcttgtcactcttgctcaaaagtgtcctgcagctaaggagtacttcaaggagaattcccaccactggagctgggctgtgcagtggctacagaagaagatgtcagaacattactggacaccacagagtaatgtctctaatgaaacatcaactggaaaaacctttcagcgaaccatttcagctcaggacacgttagcgtatgccacagctttgttgaatgaaaaagagcaatcaggaagcagtaatgggtcggagagtagtcctgccaatgagaacggagacaggcatctacagcagggttcagaatctcccatgatgattggtgagttgagaagtgaccttgatgatgttgatccctagaggaacatgcccagcctgagaggagtcaagacacaatactggatgctcagcaccttcttggaatcagaatctcgaaccctttggaagagcctggagattggactgggaaagctgctgtgacttgggcggatcgtgtatttctcaaggaaagcatttttaagccactagaaggtttgggagctgtttggcagtgggagaactccggcatgtggatcagctgtcccgggagcgtggtctatatgtggattcacatttctgtggagattttcggaaatagagccagtggcagacttttttgttacacgaacatacaagagtgagcataaagctgttgctttctctacgatgctacaaaagaaattcctttggtttttatattttaagaaaaagcaagctgcttttagatatgtgggggcaaatttttaatcttgcagtaatattaaacaggaatatccaatttaaaatgatgtaaagatgtaataaaattccttttcattgtaaaatagtaattaagtcaatttacacagacctttgtatttaatatgtctccctatttgtatagaatttcagatgggtctagatgagaaccctatgcataagcttggatcttgatgaaaggttaccaggatcaggatcaaaaattgggaaatactaagctcttgaagatatttttctgatataattagattgaaaagagcaattttgaaaatgctgtgttctccagaagtacagggtgcattatttgacatcaattacttaaagaagttatgagttgttccccaaacagattttaaaaacagcaaaataaaagcactttaagatataattttactgagtttaacttcacagaattatctttttaatgcttggagacatattgaataaactgtagtcttaaatcatgtgatctgcaatcgtttgcttttgcttaaaacataattactgaaacccttggtattggttgtatatgaagttaactatttgagttggtacacactgcttgtgagtttcatagttattgtaatgcagagaaggaatttgagaatttgtttctcctcaacatgactaattaacactgaaaagtcagtcaaggtttaagatttattttcccagaaataaatataaagcaattgaataaccatccatttagtcgtatttccaaagtatagcaccattcactcatttataccagctcccttttatggtgtgggggagaggtttacacccacatatttcatatatattttgtacattttgtattttgaattgctcacattttcggccctgttttgcctttagttacaggtcctgccttattttcatctcaccatgcacagaactagggagccttaggaagtgccaggttttcactgtcagatttgccaagtcacagaggcgcagccagccctgaagtgcctgtctggctgctgtggcattgtgtgggcatgtggccaggcagatggcatctcattactgtgctctcgccatggcccagtcttttcattctctggcagtgagggtttctgtgctgtcagacttcattgttattctgtgacttgctggaggttggcagtggcctttgtcaaacacactgagaagatggaagggccagcacttaagagcagaactgtacccttagagaaacggacagaggcgagtggcaaacttcagacggttccaatggtcttgcagtttgaaatgtgatgttctaccattggttttgagtacgtgaatacttcctgtcctactgtttcccctaccctattctcaccttctctccgcccacatcctcaccaagagattgtgtgggacatgaccttgaaatgctggcgatgatccacactgggatatcatcgctggcgactgcactctcaggagcccaaaatcaggagtgaaattgccacttctagtccccttatttcctatggaaacaacgccttccgcacccctagcacctgccgtcctcactgtaaaggttcatcaggatcgtccaccgtgtatattatacgcttcagatcatgttgcttatattgttgctgcaatgaccatcgttttcactttgctggtaaccacttgattgctgacagctacagtcaatgaacctgctgatgactttttttaatgtagtacaacagtgacagttatgacaggcttaccttggaagagttgtcatttttactgccaattttttggatgaagatgtttttataaacctttcaaaatggtctgcaaacagagcaggaattgcacaattaactcaataatgctgtgtgttctcaagaagctcccttagtgaggccgatcttaagatggccgattctgcccgttgaaggcatcctgggaaagaaaacaagcatcccagcgggcatctcaccacgacttctcctggagtcctcacacggtcactgacaactacagtcagttttaggaactagagtgccgtatcatcagacttaccctgtcctgccccaccttccctgctaacatcgaggtgtgtgcagttaccttctgagcttggaacaagcagactggaattttcctctgctacctcttgtgtataaaatcttgtttataaaatttcaaaaggaagtagatacactagggaagaaccttaattctaaatttggttcatgtgtggcaaagttcttagcttctaagagtataaaataaatttttcaaaaac

SEQ ID NO: 837 - DNA, 5510 bp, Homo sapiens
  misc_feature (13)..(13): n is a, c, g, or t
  misc_feature (50)..(50): n is a, c, g, or t
  misc_feature (64)..(64): n is a, c, g, or t
  misc_feature (79)..(79): n is a, c, g, or t
  misc_feature (92)..(92): n is a, c, g, or t
  misc_feature (107)..(107): n is a, c, g, or t
  misc_feature (109)..(109): n is a, c, g, or t
  misc_feature (114)..(114): n is a, c, g, or t
  misc_feature (172)..(172): n is a, c, g, or t
  misc_feature (183)..(183): n is a, c, g, or t
  misc_feature (193)..(193): n is a, c, g, or t
  misc_feature (599)..(599): n is a, c, g, or t
  misc_feature (644)..(743): n is a, c, g, or t
  misc_feature (752)..(752): n is a, c, g, or t
  misc_feature (767)..(767): n is a, c, g, or t
  misc_feature (888)..(888): n is a, c, g, or t
  misc_feature (950)..(950): n is a, c, g, or t
  misc_feature (1512)..(1611): n is a, c, g, or t
  misc_feature (1624)..(1624): n is a, c, g, or t
  misc_feature (1640)..(1640): n is a, c, g, or t
  misc_feature (1648)..(1648): n is a, c, g, or t
  misc_feature (1707)..(1707): n is a, c, g, or t
  misc_feature (2223)..(2223): n is a, c, g, or t
  misc_feature (2229)..(2229): n is a, c, g, or t
  misc_feature (2335)..(2335): n is a, c, g, or t
  misc_feature (2352)..(2352): n is a, c, g, or t
  misc_feature (2364)..(2364): n is a, c, g, or t
  misc_feature (2383)..(2482): n is a, c, g, or t
  misc_feature (2961)..(2961): n is a, c, g, or t
  misc_feature (2975)..(2975): n is a, c, g, or t
  misc_feature (3023)..(3023): n is a, c, g, or t
  misc_feature (3093)..(3093): n is a, c, g, or t
  misc_feature (3160)..(3160): n is a, c, g, or t
  misc_feature (3225)..(3225): n is a, c, g, or t
  misc_feature (3227)..(3227): n is a, c, g, or t
  misc_feature (3232)..(3232): n is a, c, g, or t
  misc_feature (3246)..(3246): n is a, c, g, or t
  misc_feature (3264)..(3363): n is a, c, g, or t
  misc_feature (3368)..(3368): n is a, c, g, or t
  misc_feature (3402)..(3402): n is a, c, g, or t
  misc_feature (3968)..(3968): n is a, c, g, or t
  misc_feature (4055)..(4154): n is a, c, g, or t
  misc_feature (4184)..(4184): n is a, c, g, or t
  misc_feature (4186)..(4186): n is a, c, g, or t
  misc_feature (4209)..(4209): n is a, c, g, or t
  misc_feature (4214)..(4214): n is a, c, g, or t
  misc_feature (4280)..(4280): n is a, c, g, or t
  misc_feature (4282)..(4282): n is a, c, g, or t
  misc_feature (4404)..(4404): n is a, c, g, or t
  misc_feature (4471)..(4471): n is a, c, g, or t
gggcttgggcccngtttgacccagttttttgttggttttttcaggagcantccgggcgggcccngcttcagcctttttngttcccgggggcngttccttttcggcantngcagntcccgcttttgggttccggcgcccgttgagcggacagaggagagggtttcgtgcgttngttccagccgnttcgggcgcngagttccaggacccgccccccgcgccagttgccagggagcggttgccatagagctgagcagttgtccgcgtgcgcaggcggaagtcccggattgaggcgccgccatttttgctgcccggacgcggagcgagaggctgagagagtcggagacactatccgcttccatccgtcgcgcagaccctgccggagccgctgccgctatggatgatcgagaggatctggtgtaccaggcgaagctggccgagcaggctgagcgatacgacggtgagttgggggggcaacggggggctggaattctcggaccctctgccgccgcccacagaggccgggaacaggagacaaaatggcggcatcgtctgcgaacctggcccgggggcttgggttcgggaaacatgaaatggcctgngagctcccggggcgatgggaggctctatgccctggaatgtgaccnnnnnnnnnnnnnnnnnnnnnnnnnnnnnnnnnnnnnnnnnnnnnnnnnnnnnnnnnnnnnnnnnnnnnnnnnnnnnnnnnnnnnnnnnnnnnnnnnnnnaaatctttntcttaaacgggcagntcatttttttttgctggaaaatagttaggtgtgcctaattaccttatttaatgagaggtgctttcagaccacactaaattatattagatagtatatgaagtctttctcattccatctaacngaccttctggagtctttgtattggctcttagtttggtttccttaacatgtttttggcttttnactcatattagttttgatgattatgaaattatttttgttaaaatgttttttcgcagtagcttgacagaaaaaaactactttgaaaggaatatgttaagaaaacttcaaatttgtaaggtctgacttttccttttcccatacagaaatggtggagtcaatgaagaaagtagcagggatggatgtggagctgacagttgaagaaagaaacctcctatctgttgcatataagaatgtgattggagctagaagagcctcctggagaataatcagcagcattgaacagaaagaagaaaacaagggaggagaagacaagctaaaaatgattcgggaatatcggcaaatggtgagattgttgtgccatcatccccccttatccacagtttgagttacctgtaggacggtacacttaagattttgagagaaaaggagactacattcatataacttgtattacagtatgttataatgtttctgatattgatctttgtgcctggtttataagttaaacttacccgtggctatgcatgaggacaaaacatagtctgtatcaggtttggtattnnnnnnnnnnnnnnnnnnnnnnnnnnnnnnnnnnnnnnnnnnnnnnnnnnnnnnnnnnnnnnnnnnnnnnnnnnnnnnnnnnnnnnnnnnnnnnnnnnnntttaacggttgcnaccttgtgaaagaagntaattcangtaattgaccagcatttaccaagaagcatcagtgttcagttttagtcattggtaattcngtagctgtactgtggtactgtgaagggggtgtgggggctggcgtgtgtgcgtgcctgcatgtgtgtgtgtaacaataggcagcatgcagaagggaaaagatactttttataacctagaggcagcttttctctgcttttgtgtcaagaaggaagaagggagtttggagagggatacaaattctttttaatactaagctctctacctcaaaaccagagatagaatatgtaataatttgtagaatttctagacttaatctgatttaaaaaaaatttttttttttttaggttgagactgagctaaagttaatctgttgtgacattctggatgtactggacaaacacctcattccagcagctaacactggcgagtccaaggttttctattataaaatgtaggttctatactaaaagggaaaatgtaagattgaaagttggtccttttagaaccataactttgttctatgtaggttttcaacttttatttaaaaataattgttcaatgttagaaggatagtnaatatnggaatgaaaaggtggttgggctattatgaaaatgtattagcttttgcttatttatattcttttgtttttgtgagacctatcccattcccctcccccaaacggcatncatttcacagtgcttantgttatatatanacattttattttatgattnnnnnnnnnnnnnnnnnnnnnnnnnnnnnnnnnnnnnnnnnnnnnnnnnnnnnnnnnnnnnnnnnnnnnnnnnnnnnnnnnnnnnnnnnnnnnnnnnnnnaaaaaatgaaacgaagccagttattcctgagagtgtttaaaattattgaagtacacctaattgttacatatatttttgtcacattttatataatatagaacaattttagcttattttcctttaaaaatcgttcctagtttaaattttttttttttttttaattttggttttgttttaggaaaggggactaccacaggtatctggcagaatttgccacaggaaacgacaggaaggaggctgcggagaacagcctagtggcttataaagctgctagtgatattgcaatgacagaacttccaccaacgcatcctattcgcttaggtcttgctctcaatttttccgtattctactacgaaattcttaattcccctgaccgtgcctgcaggtaagttgtggggaaaaacagcagcgctcagcgtgaaagttaaggggggcgctgtttgggttttccgtgttgtttcttgggcctgtctttgtanacttggctgcatantaattcttttggctcttactgaaactactttggatagtattaaaacanacctgtctcaacccactagcatagcagtcaggataattattttgatgtgggatatttttgttgctggtanattgaaatctaacatgttaaaatgagtagaggaaggaaatgagaggaattagaattattttaatttntgttatattagttttcagtctttttttaaatttgagaccatgtctcactctgtctcccaggctanantgcantggcgccatctcanatcactgcagccttcacnnnnnnnnnnnnnnnnnnnnnnnnnnnnnnnnnnnnnnnnnnnnnnnnnnnnnnnnnnnnnnnnnnnnnnnnnnnnnnnnnnnnnnnnnnnnnnnnnnnntgcantccagcctgggcgacagagccagactccgtcttnaaaacaaacaaacaaaactttttgaaataagtgaactattgcctagaacttggaggtatattttttggtgatggtttaggatggaagttgttctatgtattttattagtcgatatgtatattatagcatatcagtagcaggcttaaagcatagtaagaagtagtgttccacatacctttaagttaatttttattgtatttgctttttctttgcattatcattgtgactattacaaactggaataactgaagaaaagattgctgtctagcatgtcatttctaattctgattttggacttaatttttataacacttctattgaaatacctttaggttggcaaaagcagcttttgatgatgcaattgcagaactggatacgctgagtgaagaaagctataaggactctacacttatcatgcagttgttacgtgataatctgacactatggacttcagacatgcagggtgacggtaagcaagcacggagtgaaacaggcacctctttcagttgcaggatttgtttgtactctctttagacattccttggcttgtcgttatatcaagctanaatttagattcaccgcctgccctctatgaaattgtaattgctgcctttataggaaatggtgctacagtacggagttccatttttggnnnnnnnnnnnnnnnnnnnnnnnnnnnnnnnnnnnnnnnnnnnnnnnnnnnnnnnnnnnnnnnnnnnnnnnnnnnnnnnnnnnnnnnnnnnnnnnnnnnnaaattagattttgcaaaaagtttgcaaaanantcttgattcttgaagaggtgagnttatngagaaagagtattttgacccaagatttatgtgaaagcttgaatgtcattttagtaagatggtttcntnggctgtctacgtcaagagcttatttagcgtaaaaacattgagttgtactgcgcatcagtttttttcattctgttgaccaataaataatttcaggaccataatcccttcttggcttaggcatntcaggtgtcaaggatgatagaagtcctttgcctgcgtttaataccaattgtagcaagtagaagagtntttatgcttggaatgacacctttgtttgtggctgccatagcctaatgtagtcaatacgaaataattgactttttttcttttttaacaggtgaagagcagaataaagaagcgctgcaggacgtggaagacgaaaatcagtgagacataagccaacaagagaaaccatctctgaccaccccctcctccccatcccaccctttggaaactccccattgtcactgagaaccaccaaatctgacttttacatttggtctcagaatttaggttcctgccctgttggttttttttttttttttttttaaacagttttcaaaagttcttaaaggcaagagtgaatttctgtggattttactggtcccagcttttaggttctttaagacactaacaggactacatagaggctttttcagcattactgtgtcgtctccgtgccagatgtggcaagatcaccattagcaaatggaaattacatttgaaagccattagacttataggtgatgcaagcatctaagagagaggttaatcacactatagaggcataagtggtatcagttttcatttttctaattgtttaaactgtgttttataccagtgtttgcaagtaattgggtgttagcttgagatggttaaaggtggtttggggagggacttcgttgtaatggttttgctgtaaaaaatgtttccaactccgctgaaatgttgctgaaaagcatggtgctggtaacagttcaacaatccgtggctgctcattcttgcctactttactctcccactgaagcaggttagcgttgaaggtggtatggaaaagcctgcatgcctgttcaattcttttgtttcttctccttccccctccccctacctccttcccctcactcctcccctccttcgctcgctcaacctcttttgttcagtatgtgtaacttgaagctaatttgtactactggatatctgactggagccacagatacagaatctgtattgttcttactgaaacacagcatggaattaacattaaacttaaataaaacaaacctaaatt

SEQ ID NO: 838 - DNA, 1940 bp, Homo sapiens
gccgctgccagctctcgcactctgtttttccgccgctccgccgtcgcgtttctctgccggtcgcaatggaagaagagatcgccgcgctggtcattgacaatggctccggcatgtgcaaagctggttttgctggggacgacgctccccgagccgtgtttccttccatcgtcgggcgccccagacaccagggcgtcatggtgggcatgggccagaaggactcctacgtgggcgacgaggcccagagcaagcgtggcatcctgaccctgaagtaccccattgagcatggcatcgtcaccaactgggacgacatggagaagatctggcaccacaccttctacaacgagctgcgcgtggccccggaggagcacccagtgctgctgaccgaggcccccctgaaccccaaggccaacagagagaagatgactcagattatgtttgagaccttcaacaccccggccatgtacgtggccatccaggccgtgctgtccctctacgcctctgggcgcaccactggcattgtcatggactctggagacggggtcacccacacggtgcccatctacgagggctacgccctcccccacgccatcctgcgtctggacctggctggccgggacctgaccgactacctcatgaagatcctcactgagcgaggctacagcttcaccaccacggccgagcgggaaatcgtgcgcgacatcaaggagaagctgtgctacgtcgccctggacttcgagcaggagatggccaccgccgcatcctcctcttctctggagaagagctacgagctgcccgatggccaggtcatcaccattggcaatgagcggttccggtgtccggaggcgctgttccagccttccttcctgggtatggaatcttgcggcatccacgagaccaccttcaactccatcatgaagtgtgacgtggacatccgcaaagacctgtacgccaacacggtgctgtcgggcggcaccaccatgtacccgggcattgccgacaggatgcagaaggagatcaccgccctggcgcccagcaccatgaagatcaagatcatcgcacccccagagcgcaagtactcggtgtggatcggtggctccatcctggcctcactgtccaccttccagcagatgtggattagcaagcaggagtacgacgagtcgggcccctccatcgtccaccgcaaatgcttctaaacggactcagcagatgcgtagcatttgctgcatgggttaattgagaatagaaatttgcccctggcaaatgcacacacctcatgctagcctcacgaaactggaataagccttcgaaaagaaattgtccttgaagcttgtatctgatatcagcactggattgtagaacttgttgctgattttgaccttgtattgaagttaactgttccccttggtatttgtttaataccctgtacatatctttgagttcaacctttagtacgtgtggcttggtcacttcgtggctaaggtaagaacgtgcttgtggaagacaagtctgtggcttggtgagtctgtgtggccagcagcctctgatctgtgcagggtattaacgtgtcagggctgagtgttctgggatttctctagaggctggcaagaaccagttgttttgtcttgcgggtctgtcagggttggaaagtccaagccgtaggacccagtttcctttcttagctgatgtctttggccagaacaccgtgggctgttacttgctttgagttggaagcggtttgcatttacgcctgtaaatgtattcattcttaatttatgtaaggttttttttgtacgcaattctcgattctttgaagagatgacaacaaattttggttttctactgttatgtgagaacattaggccccagcaacacgtcattgtgtaaggaaaaataaaagtgctgccgtaaaaaaaaaaaaaaaaaaaaaaaaaaaaaaaaaa

SEQ ID NO: 839 - DNA, 5062 bp, Homo sapiens
cactaacgctcttcctagtccccgggccaactcggacagtttgctcatttattgcaacggtcaaggctggcttgtgccagaacggcgcgcgcgcgacgcacgcacacacacggggggaaacttttttaaaaatgaaaggctagaagagctcagcggcggcgcgggccgtgcgcgagggctccggagctgactcgccgaggcaggaaatccctccggtcgcgacgcccggccccgctcggcgcccgcgtgggatggtgcagcgctcgccgccgggcccgagagctgctgcactgaaggccggcgacgatggcagcgcgcccgctgcccgtgtcccccgcccgcgccctcctgctcgccctggccggtgctctgctcgcgccctgcgaggcccgaggggtgagcttatggaaccaaggaagagctgatgaagttgtcagtgcctctgttcggagtggggacctctggatcccagtgaagagcttcgactccaagaatcatccagaagtgctgaatattcgactacaacgggaaagcaaagaactgatcataaatctggaaagaaatgaaggtctcattgccagcagtttcacggaaacccactatctgcaagacggtactgatgtctccctcgctcgaaattacacggtaattctgggtcactgttactaccatggacatgtacggggatattctgattcagcagtcagtctcagcacgtgttctggtctcaggggacttattgtgtttgaaaatgaaagctatgtcttagaaccaatgaaaagtgcaaccaacagatacaaactcttcccagcgaagaagctgaaaagcgtccggggatcatgtggatcacatcacaacacaccaaacctcgctgcaaagaatgtgtttccaccaccctctcagacatgggcaagaaggcataaaagagagaccctcaaggcaactaagtatgtggagctggtgatcgtggcagacaaccgagagtttcagaggcaaggaaaagatctggaaaaagttaagcagcgattaatagagattgctaatcacgttgacaagttttacagaccactgaacattcggatcgtgttggtaggcgtggaagtgtggaatgacatggacaaatgctctgtaagtcaggacccattcaccagcctccatgaatttctggactggaggaagatgaagcttctacctcgcaaatcccatgacaatgcgcagcttgtcagtggggtttatttccaagggaccaccatcggcatggccccaatcatgagcatgtgcacggcagaccagtctgggggaattgtcatggaccattcagacaatccccttggtgcagccgtgaccctggcacatgagctgggccacaatttcgggatgaatcatgacacactggacaggggctgtagctgtcaaatggcggttgagaaaggaggctgcatcatgaacgcttccaccgggtacccatttcccatggtgttcagcagttgcagcaggaaggacttggagaccagcctggagaaaggaatgggggtgtgcctgtttaacctgccggaagtcagggagtctttcgggggccagaagtgtgggaacagatttgtggaagaaggagaggagtgtgactgtggggagccagaggaatgtatgaatcgctgctgcaatgccaccacctgtaccctgaagccggacgctgtgtgcgcacatgggctgtgctgtgaagactgccagctgaagcctgcaggaacagcgtgcagggactccagcaactcctgtgacctcccagagttctgcacaggggccagccctcactgcccagccaacgtgtacctgcacgatgggcactcatgtcaggatgtggacggctactgctacaatggcatctgccagactcacgagcagcagtgtgtcacactctggggaccaggtgctaaacctgcccctgggatctgctttgagagagtcaattctgcaggtgatccttatggcaactgtggcaaagtctcgaagagttcctttgccaaatgcgagatgagagatgctaaatgtggaaaaatccagtgtcaaggaggtgccagccggccagtcattggtaccaatgccgtttccatagaaacaaacatccccctgcagcaaggaggccggattctgtgccgggggacccacgtgtacttgggcgatgacatgccggacccagggcttgtgcttgcaggcacaaagtgtgcagatggaaaaatctgcctgaatcgtcaatgtcaaaatattagtgtctttggggttcacgagtgtgcaatgcagtgccacggcagaggggtgtgcaacaacaggaagaactgccactgcgaggcccactgggcacctcccttctgtgacaagtttggctttggaggaagcacagacagcggccccatccggcaagcagataaccaaggtttaaccataggaattctggtgaccatcctgtgtcttcttgctgccggatttgtggtttatctcaaaaggaagaccttgatacgactgctgtttacaaataagaagaccaccattgaaaaactaaggtgtgtgcgcccttcccggccaccccgtggcttccaaccctgtcaggctcacctcggccaccttggaaaaggcctgatgaggaagccgccagattcctacccaccgaaggacaatcccaggagattgctgcagtgtcagaatgttgacatcagcagacccctcaacggcctgaatgtccctcagccccagtcaactcagcgagtgcttcctcccctccaccgggccccacgtgcacctagcgtccctgccagacccctgccagccaagcctgcacttaggcaggcccaggggacctgtaagccaaacccccctcagaagcctctgcctgcagatcctctggccagaacaactcggctcactcatgccttggccaggaccccaggacaatgggagactgggctccgcctggcacccctcagacctgctccacaatatccacaccaagtgcccagatccacccacaccgcctatattaagtgagaagccgacaccttttttcaacagtgaagacagaagtttgcactatctttcagctccagttggagttttttgtaccaacttttaggattttttttaatgtttaaaacatcattactataagaactttgagctactgccgtcagtgctgtgctgtgctatggtgctctgtctacttgcacaggtacttgtaaattattaatttatgcagaatgttgattacagtgcagtgcgctgtagtaggcatttttaccatcactgagttttccatggcaggaaggcttgttgtgcttttagtattttagtgaacttgaaatatcctgcttgatgggattctggacaggatgtgtttgctttctgatcaaggccttattggaaagcagtcccccaactacccccagctgtgcttatggtaccagatgcagctcaagagatcccaagtagaatctcagttgattttctggattccccatctcaggccagagccaaggggcttcaggtccaggctgtgtttggctttcagggaggccctgtgccccttgacaactggcaggcaggctcccagggacacctgggagaaatctggcttctggccaggaagctttggtgagaacctgggttgcagacaggaatcttaaggtgtagccacaccaggatagagactggaacactagacaagccagaacttgaccctgagctgaccagccgtgagcatgtttggaaggggtctgtagtgtcactcaaggcggtgcttgatagaaatgccaagcacttctttttctcgctgtcctttctagagcactgccaccagtaggttatttagcttgggaaaggtggtgtttctgtaagaaacctactgcccaggcactgcaaaccgccacctccctatactgcttggagctgagcaaatcaccacaaactgtaatacaatgatcctgtattcagacagatgaggactttccatgggaccacaactattttcagatgtgaaccattaaccagatctagtcaatcaagtctgtttactgcaaggttcaacttattaacaattaggcagactctttatgcttgcaaaaactacaaccaatggaatgtgatgttcatgggtatagttcatgtctgctatcattattcgtagatattggacaaagaaccttctctatggggcatcctctttttccaacttggctgcaggaatctttaaaagatgcttttaacagagtctgaacctatttcttaaacacttgcaacctacctgttgagcatcacagaatgtgataaggaaatcaacttgcttatcaacttcctaaatattatgagatgtggcttgggcagcatccccttgaactcttcactcttcaaatgcctgactagggagccatgtttcacaaggtctttaaagtgactaatggcatgagaaatacaaaaatactcagataaggtaaaatgccatgatgcctctgtcttctggactggttttcacattagaagacaattgacaacagttacataattcactctgagtgttttatgagaaagccttcttttggggtcaacagttttcctatgctttgaaacagaaaaatatgtaccaagaatcttggtttgccttccagaaaacaaaactgcatttcactttcccggtgttccccactgtatctaggcaacatagtattcatgactatggataaactaaacacgtgacacaaacacacacaaaagggaacccagctctaatacattccaactcgtatagcatgcatctgtttattctatagttattaagttctttaaaatgtaaagccatgctggaaaataatactgctgagatacatacagaattactgtaactgattacacttggtaattgtactaaagccaaacatatatatactattaaaaaggtttacagaattttatggtgcattacgtgggcattgtctttttagatgcccaaatccttagatctggcatgttagcccttcctccaattataagaggatatgaaccaaaaaaaaaaaaaaaaaaa

SEQ ID NO: 840 - DNA, 4998 bp, Homo sapiens
caaaagtattttgccatggatatagaagatgaagaaaacatgagttccagcagcactgatgtgaaggaaaaccgcaatctggacaacgtgtcccccaaggatgcgagcacacctgggcctggcgagggctctcagctctccaatgggggtggtggtggccccggcagaaagcggcccctggaggagggcagcaatggccactccaagtaccgcctgaagaaaaggaggaaaacaccagggcccgtcctccccaagaacgccctaatgcagctgaatgagatcaagcctggtttgcagtacacactcctgtcccagactgggcccgtgcacgcgcctttgtttgtcatgtctgtggaggtaaatggccaggtttttgagggctccggtcccacaaagaaaaaggcaaaactccatgctgctgagaaggccttgaggtctttcgttcagtttcctaatgcctctgaggcccacctggccatggggaggaccctgtctgtcaacacggacttcacatctgaccaggcggacttccctgacacgctcttcaatggttttgaaactcctgacaaggcggagcctcccttttacgtgggctccaatggggatgactccttcagttccagcggggacctcagcttgtctgcttccccggtgcctgccagcctagcccagcctcctctccctgtcttaccaccattcccacccccgagtgggaagaatcccgtgatgatcttgaacgaactgcgcccaggactcaagtatgacttcctctccgagagcggggagagccatgccaagagcttcgtcatgtctgtggtcgtggatggtcagttctttgaaggctcggggagaaacaagaagcttgccaaggcccgggctgcacagtctgccctggccgccatttttaacttgcacttggatcagacgccatctcgccagcctattcccagtgagggtcttcagctgcatttaccgcaggttttagctgacgctgtctcacgcctggtcctgggtaagtttggtgacctgaccgacaacttctcctcccctcacgctcgcagaaaagtgctggctggagtcgtcatgacaacaggcacagatgttaaagatgccaaggtgataagtgtttctacaggaacaaaatgtattaatggtgaatacatgagtgatcgtggccttgcattaaatgactgccatgcagaaataatatctcggagatccttgctcagatttctttatacacaacttgagctttacttaaataacaaagatgatcaaaaagaatccatctttcagaaatcagagcgaggggggtttaggctgaaggagaatgtccagtttcatctgtacatcagcacctctccctgtggagatgccagaatcttctcaccacatgagccaatcctggaagggtctcgctcttacacccaggctggattgcagtggtgcaatcatggctcactgcagcctcgacctcctgggctcttaagcgatccttccacctcaaccttccaaggagctgggactacagaaccagcagatagacacccaaatcgtaaagcaagaggacagctacggaccaaaatagagtctggtgaggggacaattccagtgcgctccaatgcgagcatccaaacgtgggacggggtgctgcaaggggagcggctgctcaccatgtcctgcagtgacaagattgcacgctggaacgtggtgggcatccagggatccctgctcagcattttcgtggagcccatttacttctcgagcatcatcctgggcagcctttaccacggggaccacctttccagggccatgtaccagcggatctccaacatagaggacctgccacctctctacaccctcaacaagcctttgctcagtggcatcagcaatgcagaagcacggcagccagggaaggcccccaacttcagtgtcaactggacggtaggcgactccgctattgaggtcatcaacgccacaactgggaaggatgagctgggccgcgcgtcccgcctgtgtaagcacgcgttgtactgtcgctggatgcgtgtgcacggcaaggttccctcccacttactacgctccaagattaccaagcccaacgtgtaccatgagtccaagctggcggcaaaggagtaccaggccgccaaggcgcgtctgttcacagccttcatcaaggcggggctgggggcctgggtggagaagcccaccgagcaggaccagttctcactcacgccctgacccgggcagacatgatggggggtgcagggggctgtgggcatccagcgtcatcctccagaacctcacatctgaactgggggcaggtgcataccttggggagggagtagggggacacgggggaccaccaggtgtccacggttgtccccagcatctcacatcagacctggggcaggtgcgcagtgtggggaggggatggggtgcgtcagggcccagcatcgccgcctggcatctcctcgccgcagcatttccccttctgaaccgtccagtgactgctttcaatctcggtttacgtttagaaattgagttctactgagtagggcttccttaagtttaggaaaatagaaattactttgtgtgaaattcttgaataaataatttattcagagctaggaatgtggtttataaaataggaagtaattgtgtcaggtcacttttatgccacattattttaattgcaaaaaagcatctatatatggaggagggtgggaaaatagaggtaggaaatagtagcctaaaggaaatcgccacacgtctgtctaaacttaggtctcttttctccgtaggtacctccctgggtagttccacacactaggttgtaacagtctctccctgaggagcagactcccagcatggtgtagcgtggccctgtcatgcacatggggtcccgcagcagtgactgtgtgtcctgcagaggcgtgacccaggcccctgtagccctcagcctcctctagaagcttctgtactccttgtaggatcagatcatggaaaacttttctcagtttacttctaagtaatcacagataatacatggccagtaatcccaggctggccattcattcaggttttttaaaggatatttaacttttatggactagaaggaatcacgagggctactgcacaatacatggcctaagttccctctgttccttcctctgaatcgaatggatgtgggtgaccgcccgaaggccttcacaggatggaagtagaatgatttcagtagatactcattcttggaaaatgccatagttttaaattattgtttccagctttatcaaagacatgtttgaaaaataaaaagcatccaagtgagagctggtgagaccacgtgctgctggcgtagtgtaggccagacattgacagtcctgacgggagctcagggctgcccagcgcccagcgtgcacgggacggccccacgacagagggagtcagcccgggaggtcaggagcgcggcgggcgagggccctgtgtggaccacctccaccaagctcagagatttgcaccaggtgccttgttgcctccgctcaggatgaaagaggagctgagagaagtgctctgcctgccagtgcagtgcccagctccaaggctctagagggtgttcaggtgggtctcctggggccatggggagagattggtgcagaccttaccccacagcatacacctgccacagcgaaatccagggtgttggcacctgtgtgtccgtgatgagcctaggaaaccagagcaggggcagaggggcgtcatcctcccaccggacgctgggagctcagaccccaaaactgaaacaccgtggcttcggcggggggtgtgcctcctgatgtcaggagccccatccacgtgtgtccacacagatctcgtcgcagcacggcaggaaggggtgctgcttagggctcattgttggggacatgaccgggttcagcggctaaaacatctgccccacagcagcctcctcctccaccgaaaagggtagttgtctccctgaagcagtcacagcaggcgtctctgccgctccgtcaccacagtggggttttgttcaggcaaatcgcgctggggttctgcacctgcaaaaggagaggggtctgttgtcgctggctttcccccaagcaggctcttgcacactctagaaaaaacaccttgtaagtctgtgcatttttattgtcttgataaattgtatttttttctaatggggattgggagatggacttcgtttttaaaaatatgtggattttggttaccaagtttagtgttaatatattccatatacatacaaaactacccggtatgtctggcttttcccttctgtcaggtaatagctaaagtcagcatgattgctccctgtaccaccccaaataagtgagtgcctcaccttgtggggcctgagcagctaccttgagaccatgtgaggtggcacctttccggggtggactcgtgcggccttgaggacaggcacagggcaccctatcccaagccgtccaggcaggaggaaggcagccaaggcaactgggttctgggagccctgggtggggcagctgtggggaggaactgggttcggggcagccctgggcagggcggctgtggggcaagaactgggttcggggagccctgtccggcggggggctgtggggcggggagctgggttcggggagccctgggcggggtggctgttggggggaactgggttcggggagccctgggcggggtggcttttggggggaactgggttcggggagccctgtgcggggtggctgttgaggaggacttgggttcagggagccctgggcggggtggctgtcagggggaactggtttccgggagccctgggccggggcagggggcggctgtaggaaggaactggtttcggggagccctgggcggggcggctgtggggaggaaggtgacgtgcaggggaccagaggctctgcactgctcctaggacagctcatctgtaatcagaaaaaaaataaacaaaatacagaacgc

SEQ ID NO: 841 - DNA, 4282 bp, Homo sapiens
atactgtaaagaacatatagaagattttaaacaatttgaacctaatgacttttatttgaaaaacactacatgggaggatgtaggactgtgggacccatcacttacgaaaaaccaggactatcggacaaaacctttctgctgcagcgcttgtccattttcctcaaaattcttctctgcctacaaaagtcatttccgcaatgtccatagtgaagactttgaaaataggattctccttaattgcccctactgtaccttcaatgcagacaaaaagactttggaaacacacattaaaatatttcatgctccgaacgccagcgcaccaagtagcagcctcagcactttcaaagataaaaacaaaaatgatggccttaaacctaagcaggctgacagtgtagagcaagctgtttattactgtaagaagtgcacttaccgagatcctctttatgaaatagttaggaagcacatttacagggaacattttcagcatgtggcagcaccttacatagcaaaggcaggagaaaaatcactcaatggggcagtccccttaggctcgaatgcccgagaagagagtagtattcactgcaagcgatgccttttcatgccaaagtcctatgaagctttggtacagcatgtcatcgaagaccatgaacgtataggctatcaggtcactgccatgattgggcacacaaatgtagtggttccccgatccaaacccttgatgctaattgctcccaaacctcaagacaagaagagcatgggactcccaccaaggatcggttcccttgcttctggaaatgtccggtctttaccatcacagcagatggtgaatcgactctcaataccaaagcctaacttaaattctacaggagtcaacatgatgtccagtgttcatctgcagcagaacaactatggagtcaaatctgtaggccagggttacagtgttggtcagtcaatgagactgggtctaggtggcaacgcaccagtttccattcctcaacaatctcagtctgtaaagcagttacttccaagtggaaacggaaggtcttatgggcttgggtcagagcagaggtcccaggcaccagcaagatactccctgcagtctgctaatgcctcttctctctcatcgggccagttaaagtctccttccctctctcagtcacaggcatccagagtgttaggtcagtccagttccaaacctgctgcagctgccacaggccctcccccaggtaacacttcctcaactcaaaagtggaaaatatgtacaatctgtaatgagctttttcctgaaaatgtctatagtgtgcacttcgaaaaagaacataaagctgagaaagtcccagcagtagccaactacattatgaaaatacacaattttactagcaaatgcctctactgtaatcgctatttacccacagatactctgctcaaccatatgttaattcatggtctgtcttgtccatattgccgttcaactttcaatgatgtggaaaagatggccgcacacatgcggatggttcacattgatgaagagatgggacctaaaacagattctactttgagttttgatttgacattgcagcagggtagtcacactaacatccatctcctggtaactacatacaatctgagggatgccccagctgaatctgttgcttaccatgcccaaaataatcctccagttcctccaaagccacagccaaaggttcaggaaaaggcagatatccctgtaaaaagttcacctcaagctgcagtgccctataaaaaagatgttgggaaaaccctttgtcctctttgcttttcaatcctaaaaggacccatatctgatgcacttgcacatcacttacgagagaggcaccaagttattcagacggttcatccagttgagaaaaagctcacctacaaatgtatccattgccttggtgtgtataccagcaacatgaccgcctcaactatcactctgcatctagttcactgcaggggcgttggaaaaacccaaaatggccaggataagacaaatgcaccctctcggcttaatcagtctccaagtctggcacctgtgaagcgcacttacgagcaaatggaatttcccttactgaaaaaacgaaagttagatgatgatagtgattcacccagcttctttgaagagaagcctgaagagcctgttgttttagctttagaccccaagggtcatgaagatgattcctatgaagccaggaaaagctttctaacaaagtatttcaacaaacagccctatcccaccaggagagaaattgagaagctagcagccagtttatggttatggaagagtgacatcgcttcccattttagtaacaaaaggaagaagtgtgtccgtgattgtgaaaagtacaagcctggcgtgttgctggggtttaacatgaaagaattaaataaagtcaagcatgagatggattttgatgctgagtggctatttgaaaatcatgatgagaaggattccagagttaatgctagtaagactgctgacaaaaagctcaaccttgggaaggaagatgacagttcctcagacagttttgaaaatttggaagaagaatccaatgaaagtggtagcccttttgaccctgtttttgaagttgaacctaaaatctctaacgataacccagaggaacatgtactgaaggtaattcctgaggatgcttcagaatctgaggagaagctagaccaaaaagaggatggttcaaaatacgaaactattcatttgactgaggaaccaaccaaactaatgcacaatgcatctgatagtgaggttgaccaagacgatgttgttgagtggaaagacggtgcttctccatctgagagtgggcctggatcccaacaagtgtcagactttgaggacaatacctgcgaaatgaaaccaggaacctggtctgacgagtcttcccaaagcgaagatgcaaggagcagtaagccagctgccaaaaaaaaggctaccatgcaaggtgacagagagcagttgaaatggaagaatagttcctatggaaaagttgaagggttttggtctaaggaccagtcacagtggaagaatgcatctgagaatgatgagcgcttatctaacccccagattgagtggcagaatagcacaattgacagtgaggatggggaacagtttgacaacatgactgatggagtagctgagcccatgcatggcagcttagccggagttaaactgagcagccaacaggcctaagtgccaggttccctggcgttggtgacatgctgcagcctggaactctgatctccagtgtgactgcaaagctgtcttctcactggtactgccttgtgagtactggttggactgtggggcatgtggccgctgcagttccagtggttatttctaagtctatgacaggacaggctgttcttgcttcagaaccttctctgacagacacggtaactaaatgtgaaaaaccaataagctggtgactcatgaatacacacgaggaaaagcagaggtttattttatctgccttttcaacatttctttccctctgtgaaatgattggtcagatgtctttgagaagtgttaaactaattcacatggtagtgtagggccaacatacaagctaccagtctaatgtgtatagtagactttgggaaaagcgattttttttcatgtattcattctgaatagttgaaatgtatatttgtacagtcttttagacctattcaagtgatgctcatgatcctgttactgtgtgcccatcatagatttctttttttagtgttgcccttgctgtgtaataaacgctctatctagtttacctagcaaaagctcaaaactgcgctagtatggactttttggacagacttagtttttgcacataaccttgtacaatcttgcaacagaggccagccacgtaagatatatatctggactctcttgtattataggatttttcttgttctgaatatccttgacattacagctgtcaaaaacaaaaactggtatttcagatctgttttctgaaatcttttaagctaaaatcacatgcaagaattgactttgcagctactaattttgacaccttttagatctgtataaaagtgtgttgtgttgaagcagcaaaccaatgagtgctgcattttggatatttagttttatctttagttcaacaccatcatggtggattcatttataccatctaatatatgacacactgttgtagtatgtataattttgtgatctttattttccctttgtattcattttaagcatctaaataaattgctgtattgtgcttaatgt

SEQ ID NO: 842 - DNA, 2584 bp, Homo sapiens
gtgattccgtcctgcgcggttgttctctggagcagcgttcttttatctccgtccgccttctctcctacctaagtgcgtgccgccacccgatggaagattcgatggacatggacatgagccccctgaggccccagaactatcttttcggttgtgaactaaaggccgacaaagattatcactttaaggtggataatgatgaaaatgagcaccagttatctttaagaacggtcagtttaggggctggtgcaaaggatgagttgcacattgttgaagcagaggcaatgaattacgaaggcagtccaattaaagtaacactggcaactttgaaaatgtctgtacagccaacggtttcccttgggggctttgaaataacaccaccagtggtcttaaggttgaagtgtggttcagggccagtgcatattagtggacagcacttagtagtgtaccgccggaagcaccaggagctgcaagccatgcagatggagctgcagagccctgagtacaagctgagcaagctccgcacctcgaccatcatgaccgactacaaccccaactactgctttgctggcaagacctcctccatcagtgacctgaaggaggtgccacggaaaaacatcaccctcattcggggtctgggccatggagcctttggggaggtgtatgaaggccaggtgtccggaatgcccaacgacccaagccccctgcaagtggctgtgaagacgctgcctgaagtgtgctctgaacaggacgaactggatttcctcatggaagccctgatcatcagcaaattcaaccaccagaacattgttcgctgcattggggtgagcctgcaatccctgccccggttcatcctgctggagctcatggcggggggagacctcaagtccttcctccgagagacccgccctcgcccgagccagccctcctccctggccatgctggaccttctgcacgtggctcgggacattgcctgtggctgtcagtatttggaggaaaaccacttcatccaccgagacattgctgccagaaactgcctcttgacctgtccaggccctggaagagtggccaagattggagacttcgggatggcccgagacatctacagggcgagctactatagaaagggaggctgtgccatgctgccagttaagtggatgcccccagaggccttcatggaaggaatattcacttctaaaacagacacatggtcctttggagtgctgctatgggaaatcttttctcttggatatatgccataccccagcaaaagcaaccaggaagttctggagtttgtcaccagtggaggccggatggacccacccaagaactgccctgggcctgtataccggataatgactcagtgctggcaacatcagcctgaagacaggcccaactttgccatcattttggagaggattgaatactgcacccaggacccggatgtaatcaacaccgctttgccgatagaatatggtccacttgtggaagaggaagagaaagtgcctgtgaggcccaaggaccctgagggggttcctcctctcctggtctctcaacaggcaaaacgggaggaggagcgcagcccagctgccccaccacctctgcctaccacctcctctggcaaggctgcaaagaaacccacagctgcagaggtctctgttcgagtccctagagggccggccgtggaagggggacacgtgaatatggcattctctcagtccaaccctccttcggagttgcacagggtccacggatccagaaataagcccaccagcttgtggaacccaacgtacggctcctggtttacagagaaacccaccaaaaagaataatcctatagcaaagaaggagccacacgagaggggtaacctggggctggagggaagctgtactgtcccacctaacgttgcaactgggagacttccgggggcctcactgctcctagagccctcttcgctgactgccaatatgaaggaggtacctctgttcaggctacgtcacttcccttgtgggaatgtcaattacggctaccagcaacagggcttgcccttagaagccgctactgcccctggagctggtcattacgaggataccattctgaaaagcaagaatagcatgaaccagcctgggccctgagctcggtcgcacactcacttctcttccttgggatccctaagaccgtggaggagagagaggcaatcaatggctcctttcacaaaccagagaccaaatgtcacgttttgttttgtgccaacctattttgaagtaccaccaaaaaagctgtattttgaaaatgctttagaaaggttttgagcatgggttcatcctattctttcgaaagaagaaaatatcataaaaatgagtgataaatacaaggccagatgtggttgcataaggtttttatgcatgtttgttgtatacttccttatgcttcttttaaattgtgtgtgctctgcttcaatgtagtcagaattagctgcttctatgtttcatagttggggtcatagatgtttccttgccttgttgatgtggacatgagccatttgaggggagagggaacggaaataaaggagttatttgtaatgact

SEQ ID NO: 843 - DNA, 1930 bp, Homo sapiens
actgcggtgaaagccgaggcagcgggcagacgagcagggggcgggcggacatcttgggatccggagagtggccgggccggcagagcagggggccgaggacaccaggtctgttctcagagcgatgggccgcggagactgatctgccgccatgattggaggcttattcatctataatcacaagggggaggtgctcatctcccgagtctaccgagatgacatcgggaggaacgcagtggatgcctttcgggtcaatgttatccatgcccggcagcaggtgcgcagccccgtcaccaacattgctcgcaccagcttcttccacgttaagcggtccaacatttggctggcagcagtcaccaagcagaatgtcaacgctgccatggtcttcgaattcctctataagatgtgtgacgtgatggctgcctactttggcaagatcagcgaggaaaacatcaagaacaattttgtgctcatatatgagctgctggatgagattctagactttggctacccacagaattccgagacaggcgcgctgaaaaccttcatcacgcagcagggcatcaagagtcagcatcagacaaaagaagagcagtcacagatcaccagccaggtaactgggcagattggctggcggcgagagggtatcaagtatcgtcggaatgagctcttcctggatgtgctggagagtgtgaacctgctcatgtccccacaagggcaggtgctgagtgcccatgtgtcgggccgggtggtgatgaagagctacctgagtggcatgcctgaatgcaagtttgggatgaatgacaagattgttattgaaaagcagggcaaaggcacagctgatgaaacaagcaagagcgggaagcaatcaattgccattgatgactgcaccttccaccagtgtgtgcgactcagcaagtttgactctgaacgcagcatcagctttatcccgccagatggagagtttgagcttatgaggtatcgcacaaccaaggacatcatccttcccttccgggtgatcccgctagtgcgagaagtgggacgcaccaaactggaggtcaaggtggtcatcaagtccaactttaaaccctcactgctggctcagaagatcgaggtgaggatcccaaccccactgaacacaagcggggtgcaggtgatctgcatgaaggggaaggccaagtacaaggccagcgagaatgccatcgtgtggaagatcaagcgcatggcaggcatgaaggaatcgcagatcagcgcagagattgagcttctgcctaccaacgacaagaagaaatgggctcgaccccccatttccatgaactttgaggtgccattcgcgccctctggcctcaaggtgcgctacttgaaggtgtttgaaccgaagctgaactacagcgaccatgatgtcatcaaatgggtgcgctacattggccgcagtggcatttatgaaactcgctgctagctgccactaggcagctagcccacctccccagccaccctcctccacaggtccaggtgccgctccctcccccaccacacatcagtgtctcctccctcctgctttgctgccttccctctgcaccagcccgagtctaggtctgggccaagcacattacaagtgggaccggtggagcagcccctgggctccctgggcaggggagttctgaggctcctgctctcccatccacctgtctgtcctggcctaatgccaggctctgagttctgtgaccaaagccaggtgggttccctttccttcccacccctgtggccacagctctggagtgggagggttggttgcccctcacctcagagctcccccaaaggccagtaatggatccccggcctcagtccctactctgctttgggatagtgtgagcttcattttgtacacgtgtgacttcgtccagttacaaacccaataaactctgtagagtgg

SEQ ID NO: 844 - DNA, 2194 bp, Homo sapiens
ttttccgccatctttccgcgccgccacaatggtgcgcatgaatgtcctggcagatgctctcaagagtatcaacaatgccgaaaagagaggcaaacgccaggtgcttattaggccgtgctccaaagtcatcgtccggtttctcactgtgatgatgaagcatggttacattggcgaatttgaaatcattgatgaccacagagctgggaaaattgttgtgaacctcacaggcaggctaaacaaggttggagtgcagtggcacgatcttggctactgcaacctctgtctcccaggttcaagcgattctcctgcctcagcctccctagtagctgagattacagtgtggggtgatcagccccagatttgacgtgcaactcaaagacctggaaaaatggcagaataatctgcttccatcccgccagtttgggtaagttggcctttccttaattaaaagaagttaatgctaagaatttctgtggtgcagtttgacttaagggtttttttctttttttctgtttaaaacaaagcagtggtaatttgtctactcttaaccattttgacctaatagctcaagtgttatccatatttcttttctctctctttaaaaagagacagggttggccaggcacagtggctcacgcctgtgatcctagcattttgggaggctgaggcaggcggatcacctgaggttgggagttcgagaccaccctgaccaacatggagaaccccgtgtctacctaaaatacaaaattagccaggcctggtggcacacacctgtgatcccagctacttgagaggctgaggcaggaaaatagcttgaacccgggagagaggttgcggtgagctgagattgtgccattgcactccagcctgggcaacgagtgaaactctgtctcgagaaaaaagagagagagacagggtttcactttgttgcccaggctggagtgcagtggctgttcacaggtgcggtcataacacgctacagccttggcttcttggcctcgagcagtcctccccgctcagcctcttgtggatttgggaatacaggcgcctgccaccgtgcctggctatttgccacatttcatgtgttgagcttcaggttctgagaggcacatgagagcttagactggcagaaaaggggggtcgtgtccactttcatgtctgcccttttggctcactgcagatagttccctgtgatcccagatgagggccagaatcagttctaagcctaggcctttgggaaaacttagtttgggagtctttgtccttaaaagcctatctgagttcaaacccttgtttttctgctttaaagccatgagatcttgggcaagtcacagccttgatttcttcatccgtaaaagtggtaatagttcctctgtttatcacctgatttaattttggtaaagcactttatgagctgacacagtaaatgtgtatctttgtggttaagaatttataccctccaaattatgcgtctggtgccttggttgaaagtattctcacttcatggttgctgtattacaggtacggtattctcaccaaaatcatttctctttgtaattatgatactgattttaatgccgcacatttgcatactatatgcttgttacagtgatccccacagtaactcatgaagcagccactcattgtacaaatgaacgtctccatataatagtttagctattatacagtacatggcagaaacacaattcaaactcaagtttatacgaatactttcaagtctccttacctgagagcagaaagtgacatttaaatttaaaggagttcccagcctttgttttcagtgcagtttgtttcatggtgtaggcagaagtcagggctgtgtgattgtgtggctgggctctctggatttggctctttgggttgcaggagtcatggctcatacgctacatgaggcaccagctcatgtaggcactgtcagttcctatgtgccccacaggaaagcgcccttaaccactgatgagtgttgatgtttttctgcactagaaggcactatgttgaactattaaacttaccagcactttctttttccactccatagtttcattgtactgacaacctcagctggcatcatggaccatgaagaagcaagacgaaaacacacaggagggaaaatcctgggattctttttctagggatgtaatacatatatttacaaataaaatgcctcatggac

SEQ ID NO: 845 - DNA, 1174 bp, Homo sapiens
atggcggctcctcccactggggggggggtggcgcggcggcggtggcatctcggccatggcggcgactactgccaaccccgaaatgacatcagatgtaccatcactgggtccagccattgcctctggaaactctggacctggaattcaaggtggaggagccattgtccagagggctattaagcggcgaccagggctggattttgatgatgatggagaagggaacagtaaatttttgaggtgtgatgatgatcagatgtctaacgataaggagcggtttgccaggtcggatgatgagcagagctctgcggataaagagagacttgccagggaaaatcacagtgaaattgaacggcggcgacggaacaagatgacagcctacatcacagaactgtcagatatggtacccacctgtagtgccctggctcgaaaaccagacaagctaaccatcttacgcatggcagtttctcacatgaagtccttgcggggaactggcaacacatccactgatggctcctataagccgtctttcctcactgatcaggaactgaaacatttgatcttggaggcagcagatggctttctgtttattgtctcatgtgagacaggcagggtggtgtatgtgtctgactccgtgactcctgttttgaaccagccacagtctgaatggtttggcagcacactctatgatcaggtgcacccagatgatgtggataaacttcgtgagcagctttccacttcagaaaatgccctgacagggcgtatcctggatctaaagactggaacagtgaaaaaggaaggtcagcagtcttccatgagaatgtgtatgggctcaaggagatcgtttatttgccgaatgaggtgtggcagtagctctgtggacccagtttctgtgaataggctgagctttgtgaggaacagatgcaggaatggacttggctctgtaaaggatggggaacctcacttcgtggtggtccactgcacaggctacatcaaggcctggcccccagcaggtgtttccctcccagatgatgacccagcctgaggtcttccaggagatgctgtccatgctgggagatcagagcaacagctacaacaatgaagaattccctgatctaactatgtttccccccttttcagaatagaactattggggtgaggataaggggtgggggag

SEQ ID NO: 846 - DNA, 2932 bp, Homo sapiens
ctggcgttagttccggtcgcagaggagacaccgccgcagttgccggtacatcggggatttctggctctttcctcttcgccttaaattcgggtgtcttttatgaataatcaaaagcagcaaaagccaacgctatcaggccagcgttttaaaactagaaaaagagatgaaaaagagaggtttgaccctactcagtttcaagactgtattattcaaggcttaactgaaaccggtactgatttggaagcagtagctaagtttcttgatgcttctggagcaaaacttgattaccgtcgatatgcagaaacactctttgacattctggtggctggtggaatgctggcctcaggtttttaacaagttaatcaggcgctacaaatacctggagaaaggttttgaagatgaagtaaaaaagctgctgctgttcttgaagggtttttcagagtcggagaggaacaagctggctatgttgactggtgttcttctggctaatggaacacttaatgcatccattcttaatagcctttataatgaaaatttggttaaagaaggagtttcagcagcttttgctgtgaagctctttaaatcatggataaatgaaaaagatatcaatgcagtagctgcaagtcttcggaaagtcagcatggataacagactgatggaactctttcctgccaataagcaaagtgttgaacacttcacaaaatattttactgaggcaggcttgaaagagctttcagaatatgttcggaatcagcaaaccatcggagctcgtaaggagctccagaaagaacttcaagaacagatgtcccgtggtgatccatttaaggatataattttatatgtcaaggaggagatgaaaaaaaaaacaacatcccagagccagttgtcatcggaatagtctggtcaagtgtaatgagcactgtggaatggaacaaaaaagaggagcttgtagcagagcaagccatcaagcacttgaagcaatacagccctctacttgctgcctttactactcaaggtcagtctgagctgactctgttactgaagattcaggagtattgctatgacaacattcatttcatgaaagccttccagaaaatagtggtgcttttttataaagctgaagtcctgagcgaggagcccattttgaagtggtataaagatgcacatgttgcaaaggggaagagtgttttccttgagcaaatgaaaaagtttgtagaatggctcaaaaatgctgaagaagaatctgaatctgaagctgaagaaggtgactgaattttgaaactacaccctcagtaaagcaaacaggagttgtagataaaatgtcatgtctcatgtgtcctggttcttacatcttcctacctccctgtatcaagcatgatataagggctttcatggcaaattttattttaactgtttctatggttgctggaaatgttgggtttagtttctaaaaccatgttttaagtagctacaggagctatagatttgaatctaatgttgcattagtcttttcagttatcttctacctcctgtattttctactgtaataatgtaatttaaggccttccacaatgaacagttcactttattccctgggttttctataaacagttttaaggatatgatttggttaaaaaataatttgttataaaaattctgtttgcaaattaaactggaaaagtatccagagtctcaaaaggcaatgatttgtgagataatatggcatgcccggagccctgctcatcaatgaaaaacccatatgtaataatcgaattcatttaacatgaatcttgagtacgtggaccattgcttgcatgttaactttttgttttgttttgttttgttttgttttgcatttttaactccagatatcctaaagctcaattgtttggtctctggttttcatccttagagaagccatggagaacagacttgaaaagtttaggaaatcataatgtggcagaggtggtgggaagaagaaagttgagctttttccccttgagaaacttctgcatttagtttctatctttccaggcaaaacaaatgggtattcttttcatacaaccattttcaaatgaaccttagaaaagtcttaacatttaaggtattttatgcacagaatacacttagattgataggaaagaactcgtaatggagtttgagtaaagaaaatgactgatgtactaaacccagtaaaaattgttgaaaatgttaaaggtcagcatgttctaattgggaatctagatatagcttagatttcctattggcttagagtatttgctataacaaatgaagtgcaatgacaattatatattcctactcggtcatactggactggcttcgttctcttaatatactcagtaatgactcaagcctctggctattaacataccctagttgccgttttttaattgccatgagccaaatacttcttggtatacaattgatccatttattttaatggctgccttttcattttcatcttttcttgctgctaccatctatgtatgtagtcattggggggaaaatgtagccacattttttatgggaagactttgtgttaaaagtgaacattttgaaggtttttaactggtgaaactagcctggaataatgccaccagagactgagtggaaatcgccccttttgaaggtgccattcttatgagccaaaagtttgtcatttaaaagttcattttgagggaataacatgtaatataatttgaaataaaggtatagtaaccttaaaaagaacattataactgattgttgtgaatggggtgaatttgttaaaatgagtaactttgataaagtttttcatgcacaggcaaaatgtattcactagatttctacgtagtgatctgcttttactttgtaatttgtagttctcaaaagacttttttttaaaaaaataaagtccatacttacacttagg

SEQ ID NO: 847 - DNA, 2771 bp, Homo sapiens
  misc_feature (2658)..(2658): n is a, c, g, or t
  misc_feature (2660)..(2660): n is a, c, g, or t
  misc_feature (2753)..(2753): n is a, c, g, or t
gtactcgccacggcacccaggctgcgcgcacgcggtcccggtgtgcagctggagagcgagcggccaccgggagcccccggcacagcccgcgcccgccccgcaggagcccgcgaagatgccccggcgcagcctgcacgcggcggccgtgctcctgctggtgatcttaaaggaacagccttccagcccggccccagtgaacggttccaagtggacttattttggtcctgatggggagaatagctggtccaagaagtacccgtcgtgtgggggcctgctgcagtcccccatagacctgcacagtgacatcctccagtatgacgccagcctcacgcccctcgagttccaaggctacaatctgtctgccaacaagcagtttctcctgaccaacaatggccattcagtgaagctgaacctgccctcggacatgcacatccagggcctccagtctcgctacagtgccacgcagctgcacctgcactgggggaacccgaatgacccgcacggctctgagcacaccgtcagcggacagcacttcgccgccgagctgcacattgtccattataactcagacctttatcctgacgccagcactgccagcaacaagtcagaaggcctcgctgtcctggctgttctcattgagatgggctccttcaatccgtcctatgacaagatcttcagtcaccttcaacatgtaaagtacaaaggccaggaagcattcgtcccgggattcaacattgaagagctgcttccggagaggaccgctgaatattaccgctaccgggggtccctgaccacacccccttgcaaccccactgtgctctggacagttttccgaaaccccgtgcaaatttcccaggagcagctgctggctttggagacagccctgtactgcacacacatggacgacccttcccccagagaaatgatcaacaacttccggcaggtccagaagttcgatgagaggctggtatacacctccttctcccaagtgcaagtctgtactgcggcaggactgagtctgggcatcatcctctcactggccctggctggcattcttggcatctgtattgtggtggtggtgtccatttggcttttcagaaggaagagtatcaaaaaaggtgataacaagggagtcatttacaagccagccaccaagatggagactgaggcccacgcttgaggtccccggagctcccgggcacatccaggaaggaccttgctttggaccctacacacttcggctctctggacacttgcgacacctcaaggtgttctctgtagctcaatctgcaaacatgccaggcctcagggatcctctgctgggtgcctccttgccttgggaccatggccaccccagagccatccgatcgatggatgggtgcatctcagaccaagcagcaggaattcaaagctgcttgctgtaactgtgtgagattgtgaagtggtctgaattctggaatcacaaaccaagccatgctggtgggccattaatggttggaaaacactttcatcggggctttgccagagcgtgctttcaagtgtcctggaaagtctgctgcttctccaagctttcagacaagaatgtgcactctctgcttagtttgcttgggaaactcaacttctttcctctggagacggggcatctccctctgatttccttctgctatgacaaaacctttaatctgcaccttacaactcggggacaaatgggacaggaaggatcaagttgtagagagaaaaaagaaaacaagagatatacattgtgatatattagggacactttcacagtcctgtcttctggatcacagacactgcacagaccttagggaatggcaggttcaagttccacttcttggtggggatgagaagggagagagagctagagggacaaagagaatgagaagacatggatgatctgggagagtctcagtttggaatcagaattggaatcacattctgtttatcaagccataatgtaaggacagaataatacaatattaagtccaaatccaacctcctgtcagtggagcagttatgttttatactctacagattttacaaataatgaggctgttccttgaaaatgtgttgttgctgtgtcctggaggagacatgagttccgagatgacccaatctgcctttgaatctggaggaaataggcagaaacaaaatgactgtagaacttattctctgtaggccaaatttcatttcagccacttctgcaggatccctactgccaacctggaatggagacttttatctacttctctcttctctgaagatgtcaaatcgtggtttagatcaaatatatttcaagctataaaagcaggaggttatctgtgcagggggctggcatcatgtatttaggggcaagtaataatggaatgctactaagatactccatattcttccccgaatcaacacagacagtttctgacaggcgcaactcctccattttcctcccgcaggtgagaaccctgtggagatgagtcagtgccatgactgagaaggaaccgacccctagttgagagcaccttgcagttccccgagaactttctgattcacagtctcattttgacagcatgaaatgtcctcttgaagcatagctttttaaatatctttttccttctactcctccctctgactctaagaattctntnttctggaatcgcttgaacccaggaggcggaggttgcagtaagccaaggtcatgccactgcactctagcctgggtgacagagcgagactccatntcaaaaaaaaaaaaaaaa

SEQ ID NO: 848 - DNA, 1900 bp, Homo sapiens
cagggacgcggggcaggaccgagccgggggcgaagaggacgcgggctgtgtgcgcgcgcggggtcgaccgagtgaggaggagctccaggacagcagggtctacgtcagcagcctgtagtgggcgctgccagatgcgggcttttttttatttgtttcaatgttcctaatgggttcgtttcagaagtgcctcactgttctcgtgacctggagttaaccggaacagcgtcttcattcatttctgttgggaccagacgcggagcctgggtgcgcgagccgccctccgggaggaaggcgcccggctgcgtctgcagaggcggggagaggaggcggcgagggtcccggggcgcgaggaaggcgcctgccctctcccagctcgcaggccccgggcccggccgcgcctctgcggggagagcaccccggcttcccgcgcgccctcaccaaaaggaccctacagcaaacgggtgtctttcgactctgcttgtagaaaccatttgcacatattctgtacgagcctcgctgtctccctagagccagggcctgcggatttggagaagggagcggggcaggacttccaggaggaccccaacccggcccggagagggaggaggaggcctccaggggcgcggagctttggggatgggcgtcgggccggcagtggtgcggctcactccgtccctgcccacctgcgacgggatcccccgaccggcacgggccacgccgagctcccggccagccgccggcccgcaggcagcgcgagggaggagctgcgccgccgggaaggggccgccggctccgcccaaccaggtggtgctgagcttccgctgagcgctcttttgttttgtggtttgacacttttcttgacagcatgttgcagtttcttttcggttttggttttttttaaatgttttattttgctttcccagcgggaggggaggaagaagagtgtttacaaagtcctgtagccccctcacctttctgttttcacttttgccaatgtacatcgggtttggttttcttgtattatttaaacggttgtggtttcctttttccacggaggttcaatagaagccgctgcaggagagttttaccaaccattgtgtatgcccaataatttgttatcatttccttaggtagtaacctatttttgttctggtttggttcggttatctaatggaaaggtaactggcaatgcacttgatgtggtcttgcacatgtgggtgatagagttgggttccttttttatgctgggtgtacaggtgggtttgggagagaggagcatgcgcgagagagtctccgagtgtgtgcgacgcgtgtgtgtgtggtgggttgtctgtgtgcatatgtcctgcccgtgtatatgcacccacaccatgtgcccgtgcacaccagtgactacgcagtcccccctttctggtttagctgtgggaagatctgaatctggggccgtttgaaagcaaaaacaaaccactgtctctgcttctgaaacgggaatcagtaactctttgcattttctgtcccacaagatatgcaaaaacaatgcaataatattcatttaaaaatacaattgtgagttgtgttggcattaaaactgtattttaaaaaaagacagaaatttaagggaaaaacacaagaaggcattttgcttcaatatattccgtgtaatgttttattgcattgataatgtttctgttgaagaaaccgttatacttgaattcaggtcagtttcagtatttttcaaatatttttttaaaactgaattgcaattgtgccaagcgaatataatgaattgaattaagttggttttcggattcacttcttgtatattttgctgcatgtaaagtaaatcattttgtatttggagtgtgacaagctttaaaaaaaaaaaaaaaaaaaaaaaaaa

SEQ ID NO: 849 - DNA, 1047 bp, Homo sapiens
agtgtacacgtcggttgcctaacaaccggcagcggactcctttggctatggcctccaactttaagaaggcaaacatggcatcaagttctcagcgaaaaagaatgagccctaagcctgagcttactgaagagcaaaagcaggagatccgggaagcttttgatcttttcgatgcggatggaactggcaccatagatgttaaagaactgaaggtggcaatgagggccctgggctttgaacccaagaaagaagaaattaagaaaatgataagtgaaattgataaggaagggacaggaaaaatgaactttggtgactttttaactgtgatgacccagaaaatgtctgagaaagatactaaagaagaaatcctgaaagctttcaagctctttgatgatgatgaaactgggaagatttcgttcaaaaatctgaaacgcgtggccaaggagttgggtgagaacctgactgatgaggagctgcaggaaatgattgatgaagctgatcgagatggagatggagaggtcagtgagcaagagttcctgcgcatcatgaaaaagaccagcctctattaagatcagtgtcttctttttctactgcaagcacatgtaactagatttagtgcctgccatggtgtgaaatctggcttttgagaacacaaacttttcccccacggacctccctttatcactttaatagtgaccttgagcctattttagccgtttggaagtgttctttgatattacagttctttgtaaaatgacctgcgaattaccctaattctcaaaagcaaaacaagagcacacaagcgtgaagaaaaggatcttaaagctttgagcacctgccattttgccttgcatcgtttccctcgtcatgcatttccacatatccacaaacacagaacgactttagacaagcacatgttacacctgtgttgccacaagcagtcattcttgacggctccagtttttatttgacacttgagtttagttttctcttttataaacccagtgaactcctgcactgaaaaaaaaaaaaaaaaaaaaaaaaaaaaaa

SEQ ID NO: 850 - DNA, 1116 bp, Homo sapiens
atggaggatgaagattacaacacttccatcagttacggtgatgaataccctgattatttagactccattgtggttttggaggacttatcccccttggaagccagggtgaccaggatcttcctggtggtggtctacagcatcgtctgcttcctcgggattctgggcaatggtctggtgatcatcattgccaccttcaagatgaagaagacagtgaacatggtctggttcctcaacctggcagtggcagatttcctgttcaacgtcttcctcccaatccatatcacctatgccgccatggactaccactgggttttcgggacagccatgtgcaagatcagcaacttccttctcatccacaacatgttcaccagcgtcttcctgctgaccatcatcagctctgaccgctgcatctctgtgctcctccctgtctggtcccagaaccaccgcagcgttcgcctggcttacatggcctgcatggtcatctgggtcctggctttcttcttgagttccccatctctcgtcttccgggacacagccaacctgcatgggaaaatatcctgcttcaacaacttcagcctgtccacacctgggtcttcctcgtggcccactcactcccaaatggaccctgtggggtatagccggcacatggtggtgactgtcacccgcttcctctgtggcttcctggtcccagtcctcatcatcacagcttgctacctcaccatcgtgtgcaaactgcagcgcaaccgcctggccaagaccaagaagcccttcaagattattgtgaccatcatcattaccttcttcctctgctggtgcccctaccacacactcaacctcctagagctccaccacactgccatgcctggctctgtcttcagcctgggtttgcccctggccactgcccttgccattgccaacagctgcatgaaccccattctgtatgttttcatgggtcaggacttcaagaagttcaaggtggccctcttctctcgcctggtcaatgctctaagtgaagatacaggccactcttcctaccccagccatagaagctttaccaagatgtcatcaatgaatgagaggacttctatgaatgagagggagaccggcatgctttga

SEQ ID NO: 851 - DNA, 809 bp, Homo sapiens
acatgttccctgggcctatctcggaagcgggccacaatgaccctgcaatgcacaaagtcagcgggaccctggaagatggtggtgtgggatgaggacggcttccagggccggcggcacgagttcacggccgagtgccccagcgtgctggagcttggcttcgagactgtgcgatctttgaaagtgctgagtggagcgtgggtgggcttcgagcatgctggcttccaagggcagcagtacattctggaacgaggcgaatatccaagctgggatgcctggggcggcaacacggcctaccccgccgagaggctcacctccttccggcctgcggcctgtgctaaccaccgtgactcgaggctgaccatcttcgagcaagagaacttcctgggcaagaaaggagagctgagcgatgactatccttccctccaggccatgggatgggaaggcaatgaagtagggtccttccacgtccactctggggcctgggtttgctcccagtttccgggctaccgaggatttcagtatgtgctggaatgcgatcaccattccggtgactacaaacatttccgggagtggggctctcatgccccgaccttccaggtgcagagcatccgcaggatccagcagtgaacaggggtgcggcacggaggagcgcatgcgtgccttatctgcaatggaggcgctctggaggctgtggtgtgttctctccttctgcctccccctgtaacctgtgtgaacccagcacccatgtgaactggtccgtgcacagtcagcacaaaaaactcaaacgaataaaaaagagaaagtctggt

SEQ ID NO: 852 - DNA, 1072 bp, Homo sapiens
gagcgcggcgcgggccaccatgggggcccagctcagcacgttgggccatatggtgctcttcccagtctggttcctgtacagtctgctcatgaagctgttccagcgctccacgccagccatcaccctcgagagcccggacatcaagtacccgctgcggctcatcgaccgggagatcatcagccatgacacccggcgcttccgctttgccctgccgtcaccccagcacatcctgggcctccctgtcggccagcacatctacctctcggctcgaattgatggaaacctggtcgtccggccctatacacccatctccagcgatgatgacaagggcttcgtggacctggtcatcaaggtttacttcaaggacacccatcccaagtttcccgctggagggaagatgtctcagtacctggagagcatgcagattggagacaccattgagttccggggccccagtgggctgctggtctaccagggcaaagggaagttcgccatccgacctgacaaaaagtccaaccctatcatcaggacagtgaagtctgtgggcatgatcgcgggagggacaggcatcaccccgatgctgcaggtgatccgcgccatcatgaaggaccctgatgaccacactgtgtgccacctgctctttgccaaccagaccgagaaggacatcctgctgcgacctgagctggaggaactcaggaacaaacattctgcacgcttcaagctctggtacacgctggacagagcccctgaagcctgggactacggccagggcttcgtgaatgaggagatgatccgggaccaccttccacccccagaggaggagccgctggtgctgatgtgtggccccccacccatgaaccagtacgcctgccttcccaacctggaccacgtgggccaccccacggagcgctgcttcgtcttctgagggccgggcaccggtcacacggccaccgcccccgtgaggagatgatccgggaccaccttccacccccagaggaggagccgctggtgctgatgtgcgcaccccacgccctgttcacgctcacccagtcacctccccacatcgcacact

SEQ ID NO: 853 - DNA, 1341 bp, Homo sapiens
atgaggactctgaacacctctgccatggacgggactgggctggtggtggagagggacttctctgttcgtatcctcactgcctgtttcctgtcgctgctcatcctgtccacgctcctggggaacacgctggtctgtgctgccgttatcaggttccgacacctgcggtccaaggtgaccaacttctttgtcatctccttggctgtgtcagatctcttggtggccgtcctggtcatgccctggaaggcagtggctgagattgctggcttctggccctttgggtccttctgtaacatctgggtggcctttgacatcatgtgctccactgcatccatcctcaacctctgtgtgatcagcgtggacaggtattgggctatctccagccctttccggtatgagagaaagatgacccccaaggcagccttcatcctgatcagtgtggcatggaccttgtctgtactcatctccttcatcccagtgcagctcagctggcacaaggcaaaacccacaagcccctctgatggaaatgccacttccctggctgagaccatagacaactgtgactccagcctcagcaggacatatgccatctcatcctctgtaataagcttttacatccctgtggccatcatgattgtcacctacaccaggatctacaggattgctcagaaacaaatacggcgcattgcggccttggagagggcagcagtccacgccaagaattgccagaccaccacaggtaatggaaagcctgtcgaatgttctcaaccggaaagttcttttaagatgtccttcaaaagagaaactaaagtcctgaagactctgtcggtgatcatgggtgtgtttgtgtgctgttggctacctttcttcatcttgaactgcattttgcccttctgtgggtctggggagacgcagcccttctgcattgattccaacacctttgacgtgtttgtgtggtttgggtgggctaattcatccttgaaccccatcatttatgcctttaatgctgattttcggaaggcattttcaaccctcttaggatgctacagactttgccctgcgacgaataatgccatagagacggtgagtatcaataacaatggggccgcgatgttttccagccatcatgagccacgaggctccatctccaaggagtgcaatctggtttacctgatcccacatgctgtgggctcctctgaggacctgaaaaaggaggaggcagctggcatcgccagacccttggagaagctgtccccagccctatcggtcatattggactatgacactgacgtctctctggagaagatccaacccatcacacaaaacggtcagcacccaacctga

SEQ ID NO: 854 - DNA, 4141 bp, Homo sapiens
agtgctcgcggggccgcggcggagtgtaccgtgctgctctactcgctgccattcgcccgcaggtcggcgcgctcgcccacctgagccgcgccggggctgcgggaccgtgggacagcgcgctcagcccagcctaggaaagaggcagcagtctcagcgcggagatggggagcgggcgaagttgacgagtctcccgcccacgctgcgcccctcctgcccagaggggctgcagccagcggtctgtcgcgcgtgcctgtgtgcccgaggagccgccccggggagaagacccggcgcggagttgttcccccagggaggatccgcagcccagccgagggggtcgggcggcctggctacgcaggacccagccccgcagccgcggactcccagcggcggcgaagtttggctgctgagcggcgcggcgccggaccactggacagcgggagcgatgcccgtggggggcctgttgccgctcttcagcagccccgcgggcggcgtcctgggcggggggctcggcggcggcggtggcaggaaggggtcgggccccgccgccctccgcctgacggagaagttcgtgctgctgctggtattcagcgccttcatcacgctctgcttcggggcgatcttcttcctgccagactcctccaagctgctcagcggggtcctgttccactccagccccgccttgcagccggccgccgaccacaagcccgggcccggggcgcgcgccgaggacgcggccgaggggcgagcccggcgccgcgaggagggggcacccggggacccggaggccgccctggaggacaacttggccaggatccgcgaaaaccacgagcgggctctcagggaagccaaggagaccctgcagaagctgcccgaggagatccaaagagacatcctactggagaagaagaaggtggcccaggaccagctgcgtgacaaggcgccgttcagaggcctgcccccggtggacttcgtgcccccaatcggggtggagagccgggagcccgccgacgccgccatccgcgagaaaagggcaaagatcaaagagatgatgaaacatgcttggaataattataaaggttatgcctggggattaaatgaactcaaacctatatcaaaaggaggccattcaagcagtttgtttggtaacatcaaaggagcaactatagtagatgccctggatacactttttattatggaaatgaaacatgaatttgaagaagcaaaatcatgggttgaagaaaatttagattttaatgtgaatgctgaaatttctgtctttgaagtaaatatacgctttgttggtggactactctcagcctactatctgtctggagaagagatttttcgaaagaaagcagtggaacttggggtaaaattgctacctgcatttcatactccctctggaataccttgggcattgctgaatatgaaaagtggtattggaaggaactggccctgggcctctggaggcagcagtattctggcagaatttggaaccctgcatttggagtttatgcacttgagccacttatcaggaaaccccatctttgctgaaaaggtaatgaatattcgaacagtactgaacaaactggaaaaaccacaaggcctttatcctaactatctgaatcccagtagtggacagtggggtcaacatcatgtatcagttggaggacttggagacagcttctatgagtatttgctgaaggcctggttaatgtctgacaagacagatctggaagctaagaagatgtattttgatgctgttcaggctatcgagactcatttgatccgcaagtctagcagcggactaacttatatcgcagagtggaaagggggcctcctggagcacaagatgggccacctgacctgcttcgctgggggcatgttcgcactcggggctgatgcagctcccgaaggcatggcccaacactaccttgaactcggggctgaaattgcccgtacttgtcatgaatcatataatcgaacatttatgaaactgggaccagaagctttcagatttgatggtggtgttgaagccatcgctacaagacaaaatgaaaaatactacatcttacggccagaagttatggagacttacatgtatatgtggagactgactcatgatccaaagtacaggaaatgggcctgggaagccgtagaggccttggaaaaccattgcagagtgaatggaggctattcaggcctaagggatgtttaccttcttcatgagagttatgatgatgtgcagcagagtttcttcctggcagagacattgaaatatttgtacctaatattttctgacgacgatcttcttccactggagcattggatcttcaatagcgaggcacatcttctccctatcctccctaaagataaaaaggaagttgaaatcagagaggaataaaaagacattttatattttattctgctccattcccttcactgtataccttaataattccttttctggtaatcaggcacatgatgaactttgattagtaggtctgtgattaagttcttaaattgttttgcagtcttttatgtttattatcataggtataggtggacctaaattccttatcatatcctttattaattcagccagtgtatccaccagttttttgtttatgtttttaagtaacctattatctctggatttcatgaaggtgtaatatcgtttttgttaaactgaatagaattgtatagcgatgacttcttaattataatttgatttgactgcaaaactttttcctcctctaagaggagatgatgtctgctttaagctgtaatgttttgccatgttgcaaaaagccataataataagtataaaaagctttttcctttacaatttcatgttaatctggtttgtctgtccaccagagacagatcttctgtgacagcctccttatgcaggtctatcattatttgatagaatgtcttctaaaatacttcactcacattgtaattcaaattagaaagtcattccaaaaggatcatgtcatgttgacctcatttcatcggaactgcagtatatttttgttggttaattatattagtgttttctattttgtaaatgtgtcctttaattttactttaaatgccctgtgtcatttctggattatatactagttaatttcttccattccctactacacagagaggtgagctttcaaattttgcagagctctgctatcactgaattacatttatctgaagaaaatagtacaacttaatggattagcttttgggtttaactgaatatatgaagaaattgggtctgtctaaagagagggtatttcatatggcttttagttcacttgtttgtatttcatcttgatttttttctttggaaaataaagcattctatttggttcagatttctcagatttgaaaaaggctctatctcagatgtagtaaattatttcctttcagtttgtgaaagcaggatttgactctgaaagaagctttgccaatttctacttcttcgtcatcaatcaagcaaaatctaataaattttagcccaaataagaatatagcctatctagtcccgttatagtcaacacagagatcacaacttagaacgaaatataaagaaatggccactccccatcccccacagtcctggagtaaatccaaaatcaatatatgattcttttaaacattaagtttgaaataggaatggttttctcaagaatagatttggtgtgataccttgtgtttgcttacattggcccactatatatacatatatatttatgtagatatacttccatgaaagggctaatacgatgcatatactgaagggcaaggactttgaccatgtgaattttcagccgagaatggtcagaaagatcagtacaaccccatggattaggctgaaacatatgaaattgctgcatttgtagtttaaaaactgtcagcagtttcatatggttccacctaatattattgaagacaattattttcttagctatcaataggcttaatagttttagttattttagcttttgaaagtgttttaaaagatttcctttatcggacaggaccatctttatgacctgctttctgtttttcaatatcatacattggtgtatgtcaaagaataaattagtaaaattagtaaaaaaaaaaaaaaaaaaaa

SEQ ID NO: 855 - DNA, 4810 bp, Homo sapiens
ttttggagttcatccttcatacagcttatttttgggactgtgccctctacctaagcagcgctaaattcaaatccttgttccgttcacctgttgagactgttactttctctgtgggctccattttcttgtgtcctagtttggaaagtgcccccaggcagaaagtcagggtaaatatggctcttaccaccatgtattttccttcttttaagaatcacagacttacggtgtctgtggtgcattgcctccaaacagttgctttagtttgtacacacacaaacatgcagacatatatatgtttacatgtagatagctgtttatacagaagggtaagtccaatttctgttatttaaaaatggccaggtgtggtggctcacacctgtaatcccagcaccttgggaggcttaggtgggcagatcacctggggtcaggaactcctgatgtcaggaaacctcatgagatggtgaaaccccatctctactgaaaatggaagaattagccaggcgtggtggcgggcacctgtagtcccagctactcgggaggctgaggcaagagaatagcttgaaatctggaggcggaggttatagtgagctgagattgcgccactgcactccagcctgggcgacagagtgtgagactccatctcaacaacaacaacaacaacaaaaaagtaatatattattttcacattttatgtaatgtgaaatgcagctctagacctgcttgccagtgtttctggttgtcacaaaaacaaactttagctcatctctgtttcaaaagactaaagaggttctttatgaatagtagtagttcttgaattcagatgttttttaattacgttaagtcattaatgtcccaggactttttattttagattattttttaaagtagatactgtattttatggaatgtcttctaaacttttattgaaaaatttatgacatactgtttttgtttaatgtgatgaattatgtcagtactttgtgtttgctttttacaaatcttgtttttaggaataaggacaactggatcctatttgaaagcgctttttaaaaatattttgtttcctaagattgtatttaggaattttgcatctctatgatgcaagtatgagtgtttaaaaaaatttggggggcttttaatcacattagattttagaatttttaaattttaaatactttatgaggaagtaataaaccctccttttctatgttttagaatattttatagaaaagaagttactctttgaatattttgaataactctgaagtcagtatgactaggccaaataaaatacatatttagcaaaatatatcagattcctgaatgccattgtgacatttaattgaacagaagtcatttgttctttttagataatttttaggtagtttttcttagttcatctctgccatgaagctgtagcttaaaccgtctcaaaacagagtctacagcatagagaaaattcttaaagtttttacttagtcatttatttttgatgaatttttaaaaatctcttttatacaaaaagaactgtttaatttcctgattccaaacaagaattaagtagagatgttaggaagatcccactttgttatttacttttggtaagcataacaaaggggtactcttgtagtcaaaaaataacatattttttgtcttctttcccctcttctttctccctcccccaccccatatacaaacttgtcattacatttctgagatcaaccctttgagatgctgagtttgtacatacctgttatatattttgcagttgacaaattacaatttgaacctcctctgagaaaagaaacagaagcacgagatgaaatgggattgtcatcagacccaaatttcatgttacagtggaatccttttgttgatggtgcaaatactggcaaatcaacctcaaaacgtgcaataccacctcccctacctcctaagccaaggataagcagttaccctgaagacaactttccggatgaagaaaaagcatcaaccataaaacattgtcctgattcagaaagcagagctccccaaattctcagaagacagagtagcccaagttgtgggcctgtggcagagacttcttctattggaaatggtgatggtatttcaaaactgatgagtgaaaatacagaaggatcagcacaagcaccacagttaccacgaaaaaaggacaaacgagacttccctaaaccagccatcaatggccttccacccaccccaaaagttctgatgggagcatgcttttcaaaagtttttgatggctgtcctttgaaaattaattgtgcaacatcctggatacatcctgatacaaaagatcagtacattatttttggaactgaagatggtatttacacactgaatctcaatgagctacatgaggcaacgatggaacagttatttccacggaagtgtacttggctgtatgttatcaataatactttaatgtcattatcagaaggaaaaacctttcagctctactctcacaatcttatagctttgtttgaacatgccaaaaaaccaggattagctgcccatattcaaactcacaggtttccagaccgaatactaccaagaaaattcgctttaacaacaaagattcctgatacaaaaggctgccacaaatgttgcatagtcagaaacccttacacgggacataaatacctctgtggagctttacagtctggaattgttttacttcagtggtatgagccaatgcagaaattcatgttgataaagcactttgattttcctttgccaagtcctttgaatgtttttgaaatgctggtgatacctgaacaggaataccctatggtctgtgtagctattagcaaaggcactgaatcgaatcaggtagttcagtttgagacaatcaatttgaactctgcatcttcatggtttacagaaattggtgcaggcagccagcagttagattccattcatgtaacacagttggagagagataccgttttagtgtgtttagacaaatttgtgaaaattgtaaatctacaaggaaaattaaaatcaagtaagaaactggcctctgagttaagttttgattttcgcattgaatctgtagtatgccttcaagacagtgtgttggctttctggaaacatgggatgcagggtaaaagcttcaagtcagatgaggttacccaggagatttcagatgaaacaagagttttccgcttattaggatcagacagggttgtcgttttggaaagtaggccaacagaaaatcctactgcacacagcaatctctacatcttggctggacatgaaaatagttactaagcaacagaaactgatctcaaatgacaggaaaatgaatatactccattgaaaggaaaaataaggaaattcaatacaaactgcactatgatttgctttaactattatgggttatattgcaaatgatctgtactttagggtagaattcaatattttctgcagctggaaacagctagtctatctcttgccactgtgtggtggttatatcaagtttgcttaataaaagctatgagacaaatagtcctctagttccaggaaacacagtctttttttaaaaaaaacaatgtttgtaacaagggtgccatggtatttttagataactcgtgattatcttaagagaggtaaatttagtgatcattttatatcatgtcttattccttcttaatgaacataatttgttaaattctcaagcaaggttttcacttttatattggccattctgtatgtttttgtaaaacagaatatttaatccttatttattaatctcttgctggagtggtgtaatgtatctaacttttagcaaaggagggttgcagagcagcttaaattttttttataatgtataagaattttgtttatcttttaagagtagtaaagtactttgagtgtttgggggttcaacacacacatgcaattttgcttaacaaaagtattttataatacagtttcatacagaattaccttaaaagggagtcttatgttttcaactacagatagttgtaagggatcatacagaagatattgatgatagttgaaatattcttagaaggggtgtgtatgtctagctgtgtctaccatgtgtatgtattcttgacaagcagtataaaatacctgtgatttttctttacattagggataatgcataaggaattaatcttcatatatattatcatccctaatgtagcagggggaagtatttaattgcccatgatatgtattttacttatactatgccagagaggaaactataaagtaattacacatgtaatcttgggtttttcacatatgtaggtattcattttgagtaggttgaagaagaaaaaaaatatttaaatgaattgaattcctgatgggatagtatcaataagtatttaaaagccagtattctaaaaataataaagggtagggtcatttttgagtttgtttttcttttgctattgttaatattcaaaattaaagtgttacattggtacctgttgtcttaatgcatttattgagaacagcattgagatgatgaacaaggggttagcaatagcaaaattttgactaattacttaagaggaaaacagtataagtatctcattcagtatttagcaattctgtaaaataagtattatctctatttttcagatgaggaagtaagggtttagcaaggttaagagatctatccaatttacacagcaagttagtagttgagcctgaccatgagtcttctgactctgttcttttcactatgcaatacgcaaacaataaaatgttatacaaatggaatataaagttatttattctttaaaaatgc

SEQ ID NO: 856 - DNA, 2107 bp, Homo sapiens
aacgatgatcggagacatcctgctgttcgggacgttgctgatgaatgccggggcggtgctgaactttaagctgaaaaagaaggacacgcagggctttggggaggagtccagggagcccagcacaggtgacaacatccgggaattcttgctgagcctcagatactttcgaatcttcatcgccctgtggaacatcttcatgatgttctgcatgattgtgctgttcggctcttgaatcccagcgatgaaaccaggaactcactttcccgggatgccgagtctccattcctccattcctgatgacttcaagaatgtttttgaccagaaaaccgacaaccttcccagaaagtccaagctcgtggtgggtggaaaagtgttcgccgaggtgtgcatggtttcccagccacgtccctgttttcaaagatagtttcactttggtctctgaattgaaatgctgtctactgaaagggtttcaggagcgtttatgtaaggggctgtgatgaaattgcattccccatagataaaagaaaaatcatttctatccagagatctgagcagaaggattggcttgttagtttaacacagccgtatttttggacattcagtgttacttgctgagtctgacagcctctgggcccggccaggggccctgttaacaaactgctttcacatcccaacagggtctgcttggccactcagtgcagctgcgattaaccctaaaggctttaaggaacgggccacctgtaacagagacaccagccttcctgtatagacactaaattgttagcaagagtgttgagctagttcctggtgaagtgtttccacagaagacatgtggagcagttgtggggatattaagggaaactttcctctgccttgacccctttgttaaataaaatgactttgggagccattcattgtacagttgcaggaatgagagtgattttatgatgtggtacattgggaccatgttctaaaaccttgggtttctgagtctgctttttgagtaggtgattttgaggttgaaaaaccaggggccttcatctaggaaatacagcattttccagaagcttctttgaaagggaatcctggttttgttgccaaaatgaaacgcccggggttggcgctgaatcccacaactgtgtgatttgcttgttgagttttttgttgtctggtttttttgtttgtttgtttataccaataagaatgagcctgagtgtggtggtacaggcctgtaatcccagttactagggaggctgaggcaggagaatcacttgaacctgggaagcagaggttgtgatgaaccgggattgcaccattgcactccagcctgggccacaagagtgaaactccatctcaaaaaaaaaaaaaaaaaaagttgtattagaatctggccacacccctttgtgtgtgtattacttagaattgctttagcaacctccatactataacttcaaagtggagtagtggcacagagaccatatggcctgcagaatggaaaatgtcacctgtttggccccttaccagaaaaatttgccaaccgctcaactagggtgtgatggagaatcccaaggtgtcccttccctcccaaagccactcagggaatcatctgtacccttgtggcctgcattttaacaaacatatacacaaacacattttttaaatttgctagaaatcttccctcccattttcaagtgtggttaatcaattgaccaaaacccagttttctttctttctttctttctttttttgagactccagcctggacgacagagctagactgtctccaaaggaaaaagttgtactgggaccgggcacagtggctcacgcctgtaatcctagcactttgggaggccaaggtgggcggatcacctgaggttgggagttcgagaccagcctggccaacatggagaaatgctgtctctactaaaaatgcaaaattagccgagtgtggtggtacaggcctgtaatcccagttactagggaggctgaggcaggagaatcacttgaacctgggaagcagaggttgtgatgaaccgggattgcaccattgcactccagcctgggccacaagagtgaaactccatctcaaaaaaaaaaaaaaaaaaaa

SEQ ID NO: 857 - DNA, 4494 bp, Homo sapiens
gccggcggcggcagtgtctgtggtggccgcggcggcgagagcgacggtcccatctttcccaccctcttggttgccgctggccacacgccctccgctggcggcgacttctcagctccgtgcgcccgggctggacagtgagcctcgagaggagacgcgggcggctagagccggagtggggcgagccgcggaacccggccgggagccgcgcgaggcgtgatcggagggtatggttggcatggaattgaatttcatctgtctgtgggaattgtaagcaagattgccatcacgaaagccaaagtggatttctccagtgtggtgtgcctgcccccttccgtcattgctgtgaatgggctggacggaggaggggccggcgaaaatgatgatgaaccagtgctcgtgtccttatctgcggcacccagtccccagagtgaagctgttgccaatgaactgcaggagctctccttgcagcccgagctgaccctaggcctccaccctggcaggaatcccaatttgcctccacttagtgagcggaagaatgtgctacagttgaaactccagcagcgccggacccgggaagaactggtgagccaagggatcatgccgcctttgaaaagtccagccgcatttcatgagcagagaaggagcttggagcgggccaggacagaggactatctcaaacggaagattcgttcccggccggagagatcggagctggtcaggatgcacattttggaagagacctcggctgagccatccctccaggccaagcagctgaagctgaagagagccagactagccgatgacctcaatgagaagattgcacagaggcctggccccatggagctggtggagaagaacatccttcctgttgagtccagcctgaaggaagccatcattgtgggccaggtgaactatcccaaagtagcagacagctcttccttcgatgaggacagcagcgatgccttatcccccgagcagcctgccagccatgagtcccagggttctgtgccgtcacccctggaggcccgagtcagcgaaccactgctcagtgccacctctgcatcccccacccaggttgtgtctcaacttccgatgggccgggattccagagaaatgcttttcctggcagagcagcctcctctgcctcccccacctctgctgcctcccagcctcaccaatggaaccactatccccactgccaagtccacccccacactcattaagcaaagccaacccaagtctgccagtgagaagtcacagcgcagcaagaaggccaaggagctgaagccaaaggtgaagaagctcaagtaccaccagtacatccccccggaccagaagcaggacaggggggcaccccccatggactcatcctacgccaagatcctgcagcagcagcagctcttcctccagctgcagatcctcaaccagcagcagcagcagcaccacaactaccaggccatcctgcctgccccgccaaagtcagcaggcgaggccctgggaagcagcgggacccccccagtacgcagcctctccactaccaatagcagctccagctcgggcgcccctgggccctgtgggctggcacgtcagaacagcacctcactgactggcaagccgggagccctgccggccaacctggacgacatgaaggtggcagagctgaagcaggagctgaagttgcgatcactgcctgtctcgggcaccaaaactgagctgattgagcgccttcgagcctatcaagaccaaatcagccctgtgccaggagcccccaaggcccctgccgccacctctatcctgcacaaggctggcgaggtggtggtagccttcccagcggcccggctgagcacggggccagccctggtggcagcaggcctggctccagctgaggtggtggtggccacggtggccagcagtggggtggtgaagtttggcagcacgggctccacgccccccgtgtctcccaccccctcggagcgctcactgctcagcacgggcgatgaaaactccacccccggggacacctttggtgagatggtgacatcacctctgacgcagctgaccctgcaggcctcgccactgcagatcctcgtgaaggaggagggcccccgggccgggtcctgttgcctgagccctggggggcgggcggagctagaggggcgcgacaaggaccagatgctgcaggagaaagacaagcagatcgaggcgctgacgcgcatgctccggcagaagcagcagctggtggagcggctcaagctgcagctggagcaggagaagcgagcccagcagcccgcccccgcccccgcccccctcggcacccccgtgaagcaggagaacagcttctccagctgccagctgagccagcagcccctgggccccgctcacccattcaaccccagcctggcggccccagccaccaaccacatagacccttgtgctgtggccccggggcccccgtccgtggtggtgaagcaggaagccttgcagcctgagcccgagccggtccccgccccccagttgcttctggggcctcagggccccagcctcatcaagggggttgcacctcccaccctcatcaccgactccacagggacccaccttgtcctcaccgtgaccaataagaatgcagacagccctggcctgtccagtgggagcccccagcagccctcgtcccagcctggctctccagcgcctgccccctctgcccagatggacctggagcacccactgcagcccctctttgggacccccacttctctgctgaagaaggaaccacctggctatgaggaagccatgagccagcagcccaaacagcaggaaaatggttcctcaagccagcagatggacgacctgtttgacattctcattcagagcggagaaatttcagcagatttcaaggagccgccatccctgccagggaaggagaagccatccccgaagacagtctgtgggtcccccctggcagcacagccatcaccttctgctgagctcccccaggctgccccacctcctccaggctcaccctccctccctggacgcctggaggacttcctggagagcagcacggggctgcccctgctgaccagtgggcatgacgggccagagcccctttccctcattgacgacctccatagccagatgctgagcagcactgccatcctggaccaccccccgtcacccatggacacctcggaattgcactttgttcctgagcccagcagcaccatgggcctggacctggctgatggccacctggacagcatggactggctggagctgtcgtcaggtggtcccgtgctgagcctagcccccctcagcaccacagcccccagcctcttctccacagacttcctcgatggccatgatttgcagctgcactgggattcctgcttgtagctctctggctcaagacggggtggggaaggggctgggagccagggtactccaatgcgtggctctcctgcgtgattcggcctctccacatggttgtgagtcttgacaatcacagcccctgctttttcccttccctgggaggctagaacagagaagcccttactcctggttcagtgccacgcagggcagaggagagcagctgtcaagaagcagccctggctctcacgctggggttttggacacacggtcagggtcagggccatttcagcttgacctccttttttgaggtcagggggcactgtctgtctggctacaatttggctaaggtaggtgaagcctggccaggcgggaggcttctcttctgacccagggctgagacaggttaaggggtgaatctccttcctttctctccctgctttgctgtgaagggagaaattagcctgggcctctaccccctattccctgtgtctgccaaccccaggatcccagggctccctgccattttagtgtcttggtgtagtgtaaccatttagtggttggtggcaacaattttatgtacaggtgtatatacctctatattatatatcgacatacatatatatttttgggggggggcggacaggagatgggtgcaactccctcccatcctactctcacagaagggcctggatgcaaggttacccttgagctgtgtgccacagtctggtgcccagtctggcatgcagctacccaggcccacccatcacgtgtgattgacatgtaggtaccctgccacggcctatgccccacctgccctgcttcctggctccttatcagtgccatgagggcagaggtgctacctggccttcctgccaggagctctccacccactcacattccgtccccgccgcctcactgcagccagcgtggtcctaggacaggaggagcttcgggcccagcttcaccctgcggtggggctgaggggtggccatctcctgccctggggccactggcttcacattctgggctgactcataggggagtaggggtggagtcaccaaaaccagtgctgggacaaagatggggaaggtgtgtgaactttttaaaataaacacaaaaacacag

SEQ ID NO: 858 - DNA, 1468 bp, Homo sapiens
ccatggcttcccgggaggaggtactcgccttacaagctgaagttgcccaacgtgaggaggaattgaattcgctgaagcagaagctggcgtcggctcttttggctgagcaggaaccgcagccagaacggctggttccggtgtcgccgctgccgccgaaggccgctctgtcccgagatgagattctgcgctatagccggcagctagtgctgcccgagctgggcgtgcacggacagctgcgcctggggaccgcgtgcgtgctaatcgtgggctgcggtgggctcggctgtccactagcgcagtacttggcagcggccggcgtgggccgccttggccttgtggactatgacgtggtagagatgagcaacctggcccgccaagtgctgcatggcgaggcactggctggccaggccaaggccttttcggccgccgcctcgctgcgccgcctcaattcggcagtggaatgcgtgccgtacactcaggcccttacgccagccactgccctagacctggtccgccgatatgatgtggtggctgactgctcggacaacgtgcccactcgctacctggttaatgacgcatgtgtgctggcgggtcggcccctcgtgtctgccagtgccttgcgcttcgagggccaaatcacagtctaccattatgacggtggcccttgctatcgctgcatattcccccaaccacccccagcggagacagtgaccaactgcgcggacggcggggtgctcggtgtcgttaccggggtcctgggctgcctgcaggccttggaagtgctgaaaatcgctgcgggtctgggcccctcttacagtggcagcttgttgctctttgatgccctgagagggcatttccgctctattcggctgcggagccgcaggctcgactgtgcagcttgcggggaacggcccactgtgactgatctgctggactatgaagccttctgtggctcctcagccactgataaatgccgctccctgcaactactgagcccagaggagcgtgtttctgtcaccgactataagcgactgctggattctggggcattccacctgttgctggacgtcaggcctcaggtggaggtggacatttgtcgtttgcctcatgccctacacatccctctgaaacatttggaacgcagggatgcggagagcctgaaactcttaaaagaagcaatctgggaagagaagcagggcacacaagaaggggctgctgtccccatttatgtgatttgcaaactgggaaatgactcacagaaagccgtgaagatcctccagtccttatcagcagctcaagagttagaccctttaacagttcgggatgttgtggggggcctcatggcctgggctgccaaaatcgatggaacatttccacagtactgaggtgactggtatagtctgatgagaaagatgtggattgccataatacctcaaagatacacttgtttgcatttttcggtaatata

SEQ ID NO: 859 - DNA, 1718 bp, Homo sapiens
cactttctcaaccccacagatgctccgggcccctgcccctgccccagctatggctcctggggctccctcatccagccccagccctatcctggctgtgctgctcttctcttctttggtgctgtccccggcccaggccatcgtggtttacaccgacagggaggtccatggtgctgtgggctcccgggtgaccctgcactgctccttctggtccagtgagtgggtctcagatgacatctccttcacctggcgctaccagcccgaagggggcagagatgccatttcgatcttccactatgccaagggacaaccctacattgacgaggtggggaccttcaaagagcgcatccagtgggtaggggaccctcgctggaaggatggctccattgtcatacacaacctagactacagtgacaatggcacgttcacttgtgacgtcaaaaaccctccagacatagtgggcaagacctctcaggtcacgctgtatgtctttgaaaaagtgccaactaggtacggggtcgttctgggagctgtgatcgggggtgtcctcggggtggtgctgttgctgctgctgcttttctacgtggttcggtactgctggctacgcaggcaggcggccctgcagaggaggctcagtgctatggagaaggggaaattgcacaagccaggaaaggacgcgtcgaagcgcgggcggcagacgccagtgctgtatgcaatgctggaccacagcagaagcaccaaagctgtcagtgagaagaaggccaaggggctgggggagtctcgcaaggataagaaatagcggttagcgggccgggcgggggatcgggggttaggggtggagtccgccaaaggcccaaaggtgatggtcatcgagatggagctacgaaaggatgagcagagcccggagctccggcctgctgtcaagtcccccagcagaaccagcctcaaaaacgccctcaagaacatgatgggcctgaactcggacaagtgatcgccacccccccaccccaggccctgccagagcagggggacctaggctcctcttacccccgtctaggtgctttccctctttgctcccccgccctgccctgccctcacctccctttgagatgtaagtttcattccagaattcattccccagctccatactctgtccccccagctaatacccagagcacccagatcagactctccttcagggtttatttaggttattattttttattttttaatccattctttgtttgtttacctgtgctcatcctctgcccttacacccatgactgaggaccaatgacgtcatgtggcttttgcaattcacgccccccttaagtccttaatgaagagccagcccaagtagaggggcccctgatcctcacacttcagtatagcattggttccccctgaccactttggagcactgttctgggactccaggtcttgaggagagagacagagagagagaatggatcctcataggtcagggagtgggggagggggcaaatgagccttaagaaatggtttttaaacaaccaaacaaaaagcaggaaaaacaaatgggaaatgggggggcgggggggaggaagaggctgcactgcagccacaggggattcttaggatttttctacattctgtatatttcttctcaaacctccaaatgtccttaaatgtttaataaacactgacatttccagaaaaaaaaaaaaaaaaaaaaaaaaaaa

SEQ ID NO: 860 - DNA, 3181 bp, Homo sapiens
agcacactgaggaggcgatccgcagcaggaggtggagcagctggacttccgagacctcctggggaagaaggtgagtacaaagaccctatcggaagacgacctgaaggagatcccagccgagcagatggatttccgtgccaacctgcagcggcaagtgaagccaaagactgtgtctgaggaagagaggaaggtgcacagcccccagcaggtcgattttcgctctgtcctggccaagaaggggacttccaagacccccgtgcctgagaaggtgccaccgccaaaacctgccaccccggattttcgctcagtgctgggtggcaagaagaaattaccagcagagaatggcagcagcagtgccgagaccctgaatgccaaggcagtggagagttccaagcccctgagcaatgcacagccttcagggcccttgaaacccgtgggcaacgccaagcctgctgagaccctgaagccaatgggcaacgcaaagcctgccgagacccttgaagcccatggcaatgccaagcctgatgagaacctgaaatccgctagcaaagaagaactcaagaaagacgttaagaatgatgtgaactgcaagagaggccatgcagggaccacagataatgaaaagagatcagagagccaggggacagccccagccttcaagcagaagctgcaagatgttcatgtggcagagggcaagaagctgctgctccagtgccaggtgtcttctgaccccccagccaccatcatctggacgctgaacggaaagaccctcaagaccaccaagttcatcatcctctcccaggaaggctcactctgctccgtctccatcgagaaggcactgcctgaggacagaggcttatacaagtgtgtagccaagaatgacgctggccaggcggagtgctcctgccaagtcaccgtggatgatgctccagccagtgagaacaccaaggccccagagatgaaatcccggaggcccaagagctctcttcctcccgtgctaggaactgagagtgatgcgactgtgaaaaagaaacctgcccccaagacacctccgaaggcagcaatgccccctcagatcatccagttccctgaggaccagaaggtacgcgcaggagagtcagtggagctgtttggcaaagtgacaggcactcagcccatcacctgtacctggatgaagttccgaaagcagatccaggaaagcgagcacatgaaggtggagaacagcgagaatggcagcaagctcaccattctggccgcgcgccaggagcactgcggctgctacacactgctggtggagaacaagctgggcagcaggcaggcccaggtcaacctcactgtcgtggataagccagaccccccagctggcacaccttgtgcctctgacattcggagctcctcactgaccctgtcctggtatggctcctcatatgatgggggcagtgctgtacagtcctacagcatcgagatctgggactcagccaacaagacgtggaaggaactagccacatgccgcagcacctctttcaacgtccaggacctgctgcctgaccacgaatataagttccgtgtacgtgcaatcaacgtgtatggaaccagtgagccaagccaggagtctgaactcacaacggtaggagagaaacctgaagagccgaaggatgaagtggaggtgtcagatgatgatgagaaggagcccgaggttgattaccggacagtgacaatcaatactgaacaaaaagtatctgacttctacgacattgaggagagattaggatctgggaaatttggacaggtctttcgacttgtagaaaagaaaactcgaaaagtctgggcagggaagttcttcaaggcatattcagcaaaagagaaagagaatatccggcaggagattagcatcatgaactgcctccaccaccctaagctggtccagtgtgtggatgcctttgaagaaaaggccaacatcgtcatggtcctggagatcgtgtcaggaggggagctgtttgagcgcatcattgacgaggactttgagctgacggagcgtgagtgcatcaagtacatgcggcagatctcggagggagtggagtacatccacaagcagggcatcgtgcacctggacctcaagccggagaacatcatgtgtgtcaacaagacgggcaccaggatcaagctcatcgactttggtctggccaggaggctggagaatgcggggtctctgaaggtcctctttggcaccccagaatttgtggctcctgaagtgatcaactatgagcccatcggctacgccacagacatgtggagcatcggggtcatctgctacatcctagtcagtggcctttcccccttcatgggagacaacgataacgaaaccttggccaacgttacctcagccacctgggacttcgacgacgaggcattcgatgagatctccgacgatgccaaggatttcatcagcaatctgctgaagaaagatatgaaaaaccgcctggactgcacgcagtgccttcagcatccatggctaatgaaagataccaagaacatggaggccaagaaactctccaaggaccggatgaagaagtacatggcaagaaggaaatggcagaaaacgggcaatgctgtgagagccattggaagactgtcctctatggcaatgatctcagggctcagtggcaggaaatcctcaacagggtcaccaaccagcccgctcaatgcagaaaaactagaatctgaagaagatgtgtcccaagctttccttgaggctgttgctgaggaaaagcctcatgtaaaaccctatttctctaagaccattcgcgatttagaagttgtggagggaagtgctgctagatttgactgcaagattgaaggatacccagaccccgaggttgtctggttcaaagatgaccagtcaatcagggagtcccgccacttccagatagactacgatgaggacgggaactgctctttaattattagtgatgtttgcggggatgacgatgccaagtacacctgcaaggctgtcaacagtcttggagaagccacctgcacagcagagctcattgtggaaacgatggaggaaggtgaaggggaaggggaagaggaagaagagtgaaacaaagccagagaaaagcagtttctaagtcatattaaaaggactatttctctaaaactcaaaaaaaaaaaaaaaaaa

SEQ ID NO: 861 - DNA, 8561 bp, Homo sapiens
catgtcgggctccacacagcttgtggcacagacgtggagggccactgagccccgctacccgccccacagcctttcctacccagtgcagatcgcccggacgcacacggacgtcgggctcctggagtaccagcaccactcccgcgactatgcctcccacctgtcgccgggctccatcatccagccccagcggcggaggccctccctgctgtctgagttccagcccgggaatgaacggtcccaggagctccacctgcggccagagtcccactcatacctgcccgagctggggaagtcagagatggagttcattgaaagcaagcgccctcggctagagctgctgcctgaccccctgctgcgaccgtcacccctgctggccacgggccagcctgcgggatctgaagacctcaccaaggaccgtagcctgacgggcaagctggaaccggtgtctccccccagccccccgcacactgaccctgagctggagctggtgccgccacggctgtccaaggaggagctgatccagaacatggaccgcgtggaccgagagatcaccatggtagagcagcagatctctaagctgaagaagaagcagcaacagctggaggaggaggctgccaagccgcccgagcctgagaagcccgtgtcaccgccgcccatcgagtcgaagcaccgcagcctggtgcagatcatctacgacgagaaccggaagaaggctgaagctgcacatcggattctggaaggcctggggccccaggtggagctgccgctgtacaaccagccctccgacacccggcagtatcatgagaacatcaaaataaaccaggcgatgcggaagaagctaatcttgtacttcaagaggaggaatcacgctcggaaacaatggaagcagaagttctgccagcgctatgaccagctcatggaggccttggaaaaaaaggtggagcgcatcgaaaacaacccgcgccggcgggccaaggagagcaaggtgcgcgagtactacgaaaagcagttccctgagatccgcaagcagcgcgagctgcaggagcgcatgcagagcagggtgggccagcggggcagtgggctgtccatgtcggccgcccgcagcgagcacgaggtgtcagagatcatcgatggcctctcagagcaggagaacctggagaagcagatgcgccagctggccgtgatcccgcccatgctgtacgacgctgaccagcagcgcatcaagttcatcaacatgaacgggcttatggccgaccccatgaaggtgtacaaagaccgccaggtcatgaacatgtggagtgagcaggagaaggagaccttccgggagaagttcatgcagcatcccaagaactttggcctgatcgcatcattcctggagaggaagacagtggctgagtgcgtcctctattactacctgactaagaagaatgagaactataagagcctggtgagacggagctatcggcgccgcggcaagagccagcagcaacaacagcagcagcagcagcagcagcagcagcagcagcagcagcccatgccccgcagcagccaggaggagaaagatgagaaggagaaggaaaaggaggcggagaaggaggaggagaagccggaggtggagaacgacaaggaagacctcctcaaggagaagacagacgacacctcaggggaggacaacgacgagaaggaggctgtggcctccaaaggccgcaaaactgccaacagccagggaagacgcaaaggccgcatcacccgctcaatggctaatgaggccaacagcgaggaggccatcaccccccagcagagcgccgagctggcctccatggagctgaatgagagttctcgctggacagaagaagaaatggaaacagccaagaaaggtctcctggaacacggccgcaactggtcggccatcgcccggatggtgggctccaagactgtgtcgcagtgtaagaacttctacttcaactacaagaagaggcagaacctcgatgagatcttgcagcagcacaagctgaagatggagaaggagaggaacgcgcggaggaagaagaagaaagcgccggcggcggccagcgaggaggctgcattcccgcccgtggtggaggatgaggagatggaggcgtcgggcgtgagcggaaatgaggaggagatggtggaggaggctgaagccttacatgcctctgggaatgaggtgcccagaggggaatgcagtggcccagccactgtcaacaacagctcagacaccgagagcatcccctctcctcacactgaggccgccaaggacacagggcagaatgggcccaagcccccagccaccctgggcgccgacgggccacccccaggcccacccaccccaccacggaggacatcccgggcccccattgagcccaccccggcctctgaagccaccggagcccctacgcccccaccagcacccccatcgccctctgcacctcctcctgtggtccccaaggaggagaaggaggaggagaccgcagcagcgcccccagtggaggagggggaggagcagaagccccccgcggctgaggagctggcagtggacacagggaaggccgaggagcccgtcaagagcgagtgcacggaggaagccgaggaggggccggccaagggcaaggacgcggaggccgctgaggccacggccgagggggcgctcaaggcagagaagaaggagggcgggagcggcagggccaccactgccaagagctcgggcgccccccaggacagcgactccagtgctacctgcagtgcagacgaggtggatgaggccgagggcggcgacaagaaccggctgctgtccccaaggcccagcctcctcaccccgactggcgacccccgggccaatgcctcaccccagaagccactggacctgaagcagctgaagcagcgagcggctgccatcccccccatccaggtcaccaaagtccatgagcccccccgggaggacgcagctcccaccaagccagctcccccagccccaccgccaccgcaaaacctgcagccggagagcgacgcccctcagcagcctggcagcagcccccggggcaagagcaggagcccggcaccccccgccgacaaggaggccttcgcagccgaggcccagaagctgcctggggaccccccttgctggacttccggcctgcccttccccgtgcccccccgtgaggtgatcaaggcctccccgcatgccccggacccctcagccttctcctacgctccacctggtcacccactgcccctgggcctccatgacactgcccggcccgtcctgccgcgcccacccaccatctccaacccgcctcccctcatctcctctgccaagcaccccagcgtcctcgagaggcaaataggtgccatctcccaaggaatgtcggtccagctccacgtcccgtactcagagcatgccaaggccccggtgggccctgtcaccatggggctgcccctgcccatggaccccaaaaagctggcacccttcagcggagtgaagcaggagcagctgtccccacggggccaggctgggccaccggagagcctgggggtgcccacagcccaggaggcgtccgtgctgagagggacagctctgggctcagttccgggcggaagcatcaccaaaggcattcccagcacacgggtgccctcggacagcgccatcacataccgcggctccatcacccacggcacgccagctgacgtcctgtacaagggcaccatcaccaggatcatcggcgaggacagcccgagtcgcttggaccgcggccgggaggacagcctgcccaagggccacgtcatctacgaaggcaagaagggccacgtcttgtcctatgagggtggcatgtctgtgacccagtgctccaaggaggacggcagaagcagctcaggacccccccatgagacggccgcccccaagcgcacctatgacatgatggagggccgcgtgggcagagccatctcctcagccagcatcgaaggtctcatgggccgtgccatcccgccggagcgacacagcccccaccacctcaaagagcagcaccacatccgcgggtccatcacacaagggatccctcggtcctacgtggaggcacaggaggactacctgcgtcgggaggccaagctcctaaagcgggagggcacgcctccgcccccaccgccctcacgggacctgaccgaggcctacaagacgcaggccctgggccccctgaagctgaagccggcccatgagggcctggtggccacggtgaaggaggcgggccgctccatccatgagatcccgcgcgaggagctgcggcacacgcccgagctgcccctggccccgcggccgctcaaggagggctccatcacgcagggcaccccgctcaagtacgacaccggcgcgtccaccactggctccaaaaagcacgacgtacgctccctcatcggcagccccggccggacgttcccacccgtgcacccgctggatgtgatggccgacgcccgggcactggaacgtgcctgctacgaggagagcctgaagagccggccagggaccgccagcagctcggggggctccattgcgcgcggcgccccggtcattgtgcctgagctgggtaagccgcggcagagccccctgacctatgaggaccacggggcaccctttgccggccacctcccacgaggttcgcccgtgaccatgcgggagcccacgccgcgcctgcaggagggcagcctttcgtccagcaaggcatcccaggaccgaaagctgacgtcgacgcctcgtgagatcgccaagtccccgcacagcaccgtgcccgagcaccacccacaccccatctcgccctatgagcacctgcttcggggcgtgagtggcgtggacctgtatcgcagccacatccccctggccttcgaccccacctccataccccgcggcatccctctggacgcagccgctgcctactacctgccccgacacctggcccccaaccccacctacccgcacctgtacccaccctacctcatccgcggctaccccgacacggcggcgctggagaaccggcagaccatcatcaatgactacatcacctcgcagcagatgcaccacaacacggccaccgccatggcccagcgagctgatatgctgaggggcctctcgccccgcgagtcctcgctggcactcaactacgctgcgggtccccgaggcatcatcgacctgtcccaagtgccacacctgcctgtgctcgtgcccccgacaccaggcaccccagccaccgccatggaccgccttgcctacctccccaccgcgccccagcccttcagcagccgccacagcagctccccactctccccaggaggtccaacacacttgacaaaaccaaccaccacgtcctcgtccgagcgggagcgagaccgggatcgagagcgggaccgggatcgggagcgggaaaagtccatcctcacgtccaccacgacggtggagcacgcacccatctggagacctggtacagagcagagcagcggcagcagcggcagcagcggcgggggtgggggcagcagcagccgccccgcctcccactcccatgcccaccagcactcgcccatctcccctcggacccaggatgccctccagcagagacccagtgtgcttcacaacacaggcatgaagggtatcatcaccgctgtggagcccagcaagcccacggtcctgaggtccacctccacctcctcacccgttcgcccagctgccacattcccacctgccacccactgcccactgggcggcaccctcgatggggtctaccctaccctcatggagcccgtcttgctgcccaaggaggccccccgggtcgcccggccagagcggccccgagcagacaccggccatgccttcctcgccaagcccccagcccgctccgggctggagcccgcctcctcccccagcaagggctcggagccccggcccctagtgcctcctgtctctggccacgccaccatcgcccgcacccctgcgaagaacctcgcacctcaccacgccagcccggacccgccggcgccacctgcctcggcctcggacccgcaccgggaaaagactcaaagtaaacccttttccatccaggaactggaactccgttctctgggttaccacggcagcagctacagccccgaaggggtggagcccgtcagccctgtgagctcacccagtctgacccacgacaaggggctccccaagcacctggaagagctcgacaagagccacctggagggggagctgcggcccaagcagccaggccccgtgaagcttggcggggaggccgcccacctcccacacctgcggccgctgcctgagagccagccctcgtccagcccgctgctccagaccgccccaggggtcaaaggtcaccagcgggtggtcaccctggcccagcacatcagtgaggtcatcacacaggactacacccggcaccacccacagcagctcagcgcacccctgcccgcccccctctactccttccctggggccagctgccccgtcctggacctccgccgcccacccagtgacctctacctcccgcccccggaccatggtgccccggcccgtggctccccccacagcgaagggggcaagaggtctccagagccaaacaagacgtcggtcttgggtggtggtgaggacggtattgaacctgtgtccccaccggagggcatgacggagccagggcactcccggagtgctgtgtacccgctgctgtaccgggatggggaacagacggagcccagcaggatgggctccaagtctccaggcaacaccagccagccgccagccttcttcagcaagctgaccgagagcaactccgccatggtcaagtccaagaagcaagagatcaacaagaagctgaacacccacaaccggaatgagcctgaatacaatatcagccagcctgggacggagatcttcaatatgcccgccatcaccggaacaggccttatgacctatagaagccaggcggtgcaggaacatgccagcaccaacatggggctggaggccataattagaaaggcactcatgggtaaatatgaccagtgggaagagtccccgccgctcagcgccaatgcttttaaccctctgaatgccagtgccagcctgcccgctgctatgcccataaccgctgctgacggacggagtgaccacacactcacctcgccaggtggcggcgggaaggccaaggtctctggcagacccagcagccgaaaagccaagtccccggccccgggcctggcatctggggaccggccaccctctgtctcctcagtgcactcggagggagactgcaaccgccggacgccgctcaccaaccgcgtgtgggaggacaggccctcgtccgcaggttccacgccattcccctacaaccccctgatcatgcggctgcaggcgggtgtcatggcttccccacccccaccgggcctccccgcgggcagcgggcccctcgctggcccccaccacgcctgggacgaggagcccaagccactgctctgctcgcagtacgagacactctccgacagcgagtgactcagaacagggcgggggggggcgggcggtgtcaggtcccagcgagccacaggaacggccctgcaggagcggggcggctgccgactcccccaaccaaggaaggagcccctgagtccgcctgcgcctccatccatctgtccgtccagagccggcatccttgcctgtctaaagccttaactaagactcccgccccgggctggccctgtgcagaccttactcaggggatgtttacctggtgctcgggaagggaggggaaggggccggggagggggcacggcaggcgtgtggcagccacacacaggcggccagggcggccagggacccaaagcaggatgaccacgcacctccacgccactgcctcccccgaatgcatttggaaccaaagtctaaactgagctcgcagcccccgcgccctccctccgcctcccatcccgcttagcgctctggacagatggacgcaggccctgtccagcccccagtgcgctcgttccggtccccacagactgccccagccaacgagattgctggaaaccaagtcaggccaggtgggcggacaaaagggccaggtgcggcctggggggaacggatgctccgaggactggactgtttttttcacacatcgttgccgcagcggtgggaaggaaaggcagatgtaaatgatgtgttggtttacagggtatatttttgataccttcaatgaattaattcagatgttttacgcaaggaaggacttacccagtattactgctgctgtgcttttgatctctgcttaccgttcaagaggcgtgtgcaggccgacagtcggtgaccccatcactcgcaggaccaagggggcggggactgctcgtcacgccccgctgtgtcctccctccctcccttccttgggcagaatgaattcgatgcgtattctgtggccgccatttgcgcagggtggtggtattctgtcatttacacacgtcgttctaattaaaaagcgaattatactccaaaaaaaaaaaaaaaaaaa

SEQ ID NO: 862 - DNA, 689 bp, Homo sapiens
cggcatgtggaagaaggtgaagatggcggtggccagggccggggtcttgggagtccagtggctgcaaagggcatcccggaacgtgatgccgctgggcgcacggacagcctcccacatgaccaaggacatgttcccggggccctatcctaggaccccagaagaacgggccgccgccgccaagaagtataatatgcgtgtggaagactacgaaccttacccggatgatggcatggggtatggcgactacccgaagctccctgaccgctcacagcatgagagagatccatggtatagctgggaccagccgggcctgaggttgaactggggtgaaccgatgcactggcacctagacatgtacaacaggaaccgtgtggatacatcccccacacctgtttcttggcatgtcatgtgtatgcagctcttcggtttcctggctttcatgatattcatgtgctgggtgggggacgtgtaccctgtctaccagcctgtgggaccaaagcagtatccttacaataatctgtacctggaacgaggcggtgatccctccaaagaaccagagcgggtggttcactatgagatctgaggaggcttcgtgggcttttgggtcctctaactaggactccctcattcctagaaatttaaccttaatgaaatccctaataaaactcagtgctgtgttaaaaaaaaaa

SEQ ID NO: 863 - DNA, 1715 bp, Homo sapiens
ctccttgttctgctcggccgcctcggtgagcttggcgtagcggcatttgaaccactcttcggcctggtgcatattctggtctgagtggctttcgagctgggagcggatttccttcagcgccgtcgagatgtctgtcttcaggtagtctttgcgctccaccgtgatgtgcgatgcctggatctgggccagaaggtcggccacctcctcctcgtggttgctccgcaggaaggccacctcatcctgcagcgactgcaccttcttgtccagctccaccttgaccagcgacgcctcctcgatgtctttgcgcagcgcgcggatggccgcctcagtgtcgtcgcgcaaccgcgcctcctcctcaaagcgctccttgagccggtggatgtcttcctccaggtggtccgagtccagctgcacctgagccttctcgtggttcaccatctccagggtggcgcgcagctcgcggatctcctggtcgtacgcgtcgcccagctgggcgtgcgaggcctgcttctgccgcagcgcctggatctccgcctcaatctccttattctgctgctccaggtagtgcaccttctctatgtagccggcaaagcggtcgttcagcccctgcagctgctccttctcgttggagcgggacagcttgtagtcgccgccgggtccggagccgccgttgagcagggacgaggactggctgaagtcaaggctgctctcggcggagctgagcatggccgagctgtaagcgaggcgcggggcgagcatgctgcgcttataggaggaggacacggtgctgggcgagccgcgggaccacgactgcgagcggaagccactggacggggagccgctgacgcggctgaagctcgagcgggtctcggttacccgccggtaggcggacgggttgcccagcgagtccaacgtgtagctcatcttggaggccttggggcgtgtggctgtcacagcgttctgccggcctcgccgcagcccatttatagccgcggcgctggtcccgggccagggccccgccccgtggaggcggcggccgaggaggcggggactgcgggcaccggtcggggaggaggggaggggggcggctgaacggtgattcagcgcccgctccacgtgggcccaggccgcatgggaacctggacttttctgccctgggcccagcccctcccccaggtcccctttcagtcccaggctacttgtagccgggcattcgccttctttccatttctcacctcccgattgcgtttcgcacccttggtgcgaatatcgccagcgccctttctttgtcactgtcccgccgttcaggcagcgcttccccgaccccgtggtccccttgttctttagccttctaccctcttatcctcaaggctttctcttattttgccctttccctgatacttttttctttacccatcttctgtgcttaatttcatccccttcttttttggcccctcttctccttcctactctggcctttagtccagttcaccctgcccttctctcagccccttcctcggagatccttttcttccaatctttccttctccccgtctcctccctccttccccttgcattccctcttttcccctcccccaccctcatcttttcttgcctccctccccttcccccaccccttgtcttaaagcagctggagatgagcgccgaggagctgggtctagaagacaaaacaaaacaaaaaaaaaaaaaaaaaa

SEQ ID NO: 864 - DNA, 2463 bp, Homo sapiens
atttttagtttgttgaagttcgtgactgcttcactctctcattcttagcttgaatttggaaatgacttttgatgacctaaagatccagactgtgaaggaccagcctgatgagaagtcaaatggaaaaaaagctaaaggtcttcagtttctttactctccatggtggtgcctggctgctgcgactctaggggtcctttgcctgggattagtagtgaccattatggtgctgggcatgcaattatcccaggtgtctgacctcctaacacaagagcaagcaaacctaactcaccagaaaaagaaactggagggacagatctcagcccggcaacaagcagaagaagcttcacaggagtcagaaaacgaactcaaggaaatgatagaaacccttgctcggaagctgaatgagaaatccaaagagcaaatggaacttcaccaccagaatctgaatctccaagaaacactgaagagagtagcaaattgttcagctccttgtccgcaagactggatctggcatggagaaaactgttacctattttcctcgggctcatttaactgggaaaagagccaagagaagtgcttgtctttggatgccaagttgctgaaaattaatagcacagctgatctggacttcatccagcaagcaatttcctattccagttttccattctggatggggctgtctcggaggaaccccagctacccatggctctgggaggacggttctcctttgatgccccacttatttagagtccgaggcgctgtctcccagacatacccttcaggtacctgtgcatatatacaacgaggagctgtttatgcggaaaactgcattttagctgccttcagtatatgtcagaagaaggcaaacctaagagcacagtgaatttgaaggctctggaagaaaagaaaaaagtctttgagttttattctggaatttaagctattctttgtcacttgggtgccaaacatgagagcccagaaaactgtcatttagctggctgcagaactcctttgcagaaactggggttccaggtgcctggcacctttatgtcaacatttttgattctagctatctgtattatttcacctagcttgtcccaagcttccctgccagcctgaagtccattttcccctttttattttaaaatttgactcctcttcaagcttgaaaaccctctgaactcagtcttctttacctcattatcaccttcccctcacactcctaaaattgcatgaaagacagaacatggagaacttgctcaagtgcaggcagagagcaaaaaggggaaatatgtctgggaaaaagtgcacgtgaagaaacaaagaaggacagaggccattccgaaatcaagaaactcatgttcttaactttaaaaaaggtatcaatccttggtttttaaactgtggtccatctccagactctaccacttacggacagacagacagacagacacacacacacacacacacacacacattttgggacaagtggggagcccaagaaagtaattagtaagtgagtggtcttttctgtaagctaatccacaacctgttaccacttcctgaatcagttattatttcttcatttttttttctaccagaggacagattaatagatttaacccttcacaacagttcttgttagaatcatgggatgtgtggcccagaggtaagaatagaatttctttccctaaagaacataccttttgtagatgaactcttctcaactctgttttgctatgctataattccgaaacatacaagacaaaaaaaatgaagacactcaatctagaacaaactaagccaggtatgcaaatatcgctgaatagaaacagatggaattagaaatatatcttctatttttaggcttctatttcctttccacccactcttcacaggctattctactctaaaggaagcctttttattttgctgcacacaatctagcaggaatcttttttttttttttaagagctgtgtcatccttatgtaggcaagagatgtttgcttttgttaaaagctttattgagatataattaacataaaataaactgaacatatttaaagtgtactatttgataagttttcacaccttgtggagaacatgcatactacaattaagagagtgaacatatccatcatccctcaaagtgtcacaatgctcctcctgatgactcctccccagaaaaccaccaatcggctttcattttgcattttgtagttttatgtgaatggaatcatatagtatgtcttttttttttgtctggcttctttcactttgcataattattttgagattcatatgtctccatcttgatgctcgtatgaattcattcttttaaatgttgaatattcccttgtatggatataccacaattcatttacccatttacttgttgatgacatttgggttgttttagttttgggatattacaaataaagctgctgtgaacatttgtgtac

SEQ ID NO: 865 - DNA, 2262 bp, Homo sapiens
gagggaagctcctataaagggctgcatctctggactcacagctatcagaccattgagatgtggaagctgttgctgtgggttgggctggttcttgtgctgaaacaccacgatggtgctgcccataaactcgtgtgttatttcaccaactgggcacacagtcggccaggccctgcctcgatcttgccccatgacctggacccctttctctgcacccacctgatatttgcctttgcctcaatgaacaacaatcagattgttgctaaggatctccaggatgagaaaattctctacccagagttcaacaaactaaaggagaggaacagagagctgaaaacactactgtccatcggcgggtggaactttggcacctcaagattcaccactatgttgtccacatttgccaaccgtgaaaagtttattgcttcagttatatcccttctgaggacacatgactttgatggtcttgaccttttcttcttatatcctggactaagaggcagccccatgcatgaccggtggacttttctcttcttaattgaagagctcctgtttgccttccggaaggaggcactgctcaccatgcgcccgaggctgctgctgtctgctgctgtttctggggtcccacacatcgtccaaacatcctatgatgtgcgctttctaggaagactcctggatttcatcaatgtcttgtcttatgatttacatggaagttgggaaaggttcacaggacataatagccccctcttctctctgcctgaagaccccaaatcttcggcatatgctatgaattattggagaaagcttggggcaccctcagagaagctcatcatggggatccccacctatggacgtacctttcgcctcctcaaagcctctaagaatgggttgcaggccagagcgatcggaccagcatctccagggaagtacaccaagcaagaaggcttcttggcttattttgagatttgttcctttgtctggggagcgaagaagcactggattgattaccagtatgtcccgtatgccaacaaggggaaagagtgggttggctatgaaaatgccatcagcttcagttacaaggcatggtttataaggcgagagcattttgggggggccatggtgtggacattggacatggatgacgtcaggggcacgttctgtggcactggccctttcccccttgtctacgtattgaatgatatcctggtgcgggctgagttcagttcaacttctttaccacaattttggctgtcatctgctgtgaattcttcaagcactgaccctgaaaggctggctgtgaccacggcatggaccactgatagtaagattttgcccccaggaggagaggctggggtcactgagatccacggaaagtgtgaaaatatgactataacccctagaggtacaactgtgacccctacaaaggaaactgtatcccttggaaagcacactgtagctctaggagagaagactgagatcactggggcaacgaccgtgacttctgtgggtcatcagtccatgacccctggagagaaggccctgacccctgtgggtcatcaatctgtgaccactggacagaagaccctgacctctgtgggttatcagtctgtgacccctggggaaaagaccctgacccctgtgggtcatcagtctgtgacccctgtgagtcatcagtctgtgagccctggaggaacgactatgacccctgtccattttcagactgagacccttagacagaatacagtggcccctagaaggaaggctgtggcccgtgaaaaggtgactgtcccctccagaaacatatcagtcacccctgaagggcagactatgcctttaagaggggagaatttgacttctgaggtgggcactcaccccaggatgggtaacttgggtcttcagatggaagctgaaaacaggatgatgctgtcctccagccccgtcatccagctcccggaacaaactcctctagcttttgacaaccgctttgttcccatctatggaaaccattcctctgtcaactcagtaacccctcaaacaagtcctctttctctaaaaaaagaaatcccagaaaactctgctgtggatcaagaagcctaagcccctctggtgtcagaaaccagggaaaacccttgtcttttcttctaagtgacatgttggaagccttctcatcccggggcaaagcaggcatcaaaaccagaataggccaatctcttttccattaaataaactgtaaacccaaaaaaaaaaaaaaaaaaaaaaaaaaaa

SEQ ID NO: 866 - DNA, 5404 bp, Homo sapiens
gcggccgctctttgccagggagggtggcatctatgctgtgctggtctgcatgcaagaatataagacttctgtcttggtgcagcaggctgggctggcggcactgaagatgctggccgtcgccagctcctcggagatccccacttttgttactggccgagattctatccactctttgtttgatgctcagatgaccagagagatcttcgccagcatcgactcagccacacgcccgggctctgagagcctgctcctcactgtccctgcagccgtgatcctgatgctgaatactgaggggtgctcttctgcagcgagaaatggcttactcctgctcaacctacttttgtgcaaccaccacactctgggagaccagattataacccaagagctgagagacacgttgtttaggcactcagggatagcaccaagaacagaacctatgcctaccacacgcaccatcctcatgatgcttctcaatcgctactcagagccgccgggcagccctgagcgtgcagcactagagacccccatcatccagggtcaggatgggtcccctgagctactgattcgatccctggttgggggcccatctgcagaactactcctggacttggagcgtgtgctgtgccgtgagggcagccccggaggtgccgtgaggcccctcctcaagcgcctccagcaggagacccagcctttcctcctgttgctgcggactctggatgctccggggcccaacaagactctgctgctgtctgtgctgagggtcataacccgactgctggatttccctgaggcaatggtcctcccctggcacgaggtcttggagccctgcctcaactgcctgagtggccctagcagtgactccgagattgttcaggagctgacctgcttcctacatcgcctggcctcgatgcataaggactatgctgtggtgctctgctgcctgggagcaaaagagatcctctccaaagtcctggacaagcactcagctcagctgctgctgggctgtgagcttcgggacctggtgacagagtgtgagaagtacgcacagctctatagcaacctcacctccagcatcctggccggctgcattcagatggtgctgggccagatcgaagaccacagacgaacccaccaacccatcaatatccccttctttgatgtgttcctcaggcatctctgccagggctccagtgtggaagtgaaggaggacaagtgctgggagaaggtggaggtgtcctccaacccgcaccgagccagcaagctgacggaccacaaccccaagacctactgggagtccaacggcagcaccggctcccactacatcaccctgcacatgcaccgtggtgttcttgttaggcagctcactttgctggtggccagtgaggactcaagctacatgccagccagggtggtggtgtttgggggtgacagcaccagctgcatcggcactgagctcaacacggtgaatgtgatgccctctgccagccgggtgatcctcttggagaacctgaaccgcttctggcccatcatccagatccgcataaagcgctgccagcagggcggcattgacacccgggttcggggtgtggaggtcctgggccctaagcccacattctggccactgttccgggagcagctgtgtcgccgaacatgtctcttctacacaattcgggcacaagcctggagccgggacatagcagaggaccaccggcgcctcctccagctctgtcccagactgaacagggttttgcgccacgagcagaattttgctgaccgcttcctccctgatgatgaggccgcccaggcactgggcaagacctgctgggaggccctggtcagccccctggtgcagaacatcacctctcccgatgcggaaggcgtgagtgccctgggatggctgctggatcagtacttagaacagagagagacctctcggaaccccttgagtcgagcagcgtcctttgcttctcgagttcgtcgcctttgccacttgctggtgcatgtggaacctcctcctgggccttctcctgagccatccactcggcccttcagcaagaacagcaagggtcgggaccggagcccggcgccttcgccagtgcttccaagcagcagcctgaggaacataacccagtgctggctgagcgtggtgcaggagcaggtcagcagattcctggctgcagcttggagggccccagactttgtgcctcgttactgtaaactctatgagcacttgcagagagcaggctccgagctgtttgggcctcgggcagccttcatgctggctctgcgcagtggcttctctggcgccttgctgcagcagtccttcctcactgctgctcacatgagtgagcagtttgccaggtacattgaccaacagatccagggtggcctgattggtggagcccctggagtggaaatgctggggcagcttcagcggcacctggaacccattatggtcctttctggtctggaactggccacaacttttgagcacttctatcagcattatatggcggaccgtctcctgagctttggttcgagctggctggagggggctgtgctagagcagattggcctctgttttcccaaccgcctcccacagctgatgctgcagagcctgagcacctctgaggagctgcagcgccagttccacctcttccagctccagcggctcgacaagttgttcttggagcaggaagatgaggaggaaaagagactagaggaagaggaggaggaagaggaggaagaggaagctgagaaagaattatttatcgaagatccaagtccagccatttctatactggtcctgtcaccacgctgctggcccgtctccccactctgctacctgtaccatcccagaaagtgccttcccacagaattctgtgatgcccttgaccgtttctccagtttctacagccagagtcagaaccatccagtcctggacatgggaccacatcggcgactgcagtggacgtggctgggccgggctgagctgcagtttgggaagcagatactgcatgtgtccaccgtgcagatgtggctgctgctgaaattcaatcagacagaggaggtgtcagtagagaccttgctgaaggattctgacctctccccagagctgctgctccaggcactcgtgcccctcacctcagggaatggccctttgaccctgcatgagggccaggactttccacacgggggtgtgctgcggcttcatgagcctgggccccagcgcagtggggaggccctgtggctgatacctccccaggcatacctgaacgtagagaaggatgaaggccgaaccctggaacagaagaggaatctcttgagctgtcttcttgttcgtattctcaaagcccatggggaaaagggcctccacattgatcagctggtttgtctggtgctggaggcctggcagaagggtccaaatcctcctggaaccctgggccacactgttgctgggggtgtggcctgtaccagtacagatgtcctctcttgcatcctgcacctcttaggccagggctacgtgaaacggcgtgatgaccggccccagatcctgatgtatgccgctccagagcccatggggccctgccggggtcaggcagatgtccctttctgtggcagccagagcgaaacctccaagcccagcccagaagctgtggctaccctggcatctctacagctgcctgcaggccgcaccatgagcccccaggaagtagaagggttgatgaagcagacggtgcgtcaggtgcaggagacgctgaacttagagccagatgtcgctcagcaccttttggctcattcccactggggcgctgaacagctgctgcagagctacagtgaggaccctgagccactgctgctggcagctgggctgtgcgtacaccaggctcaggctgtacccgtacggcctgaccactgccccgtctgtgtgagccccctggggtgtgacgacgacctgccctctctctgctgcatgcactattgctgtaagtcttgctggaatgagtacctgacaactcggatcgagcagaaccttgttttgaattgcacctgccccattgccgactgccccgcccagcccaccggagccttcattcgtgccatcgtctcctcgccagaggtcatctccaagtatgagaaggcgctcctgcgtggctatgtggagagctgctccaacctgacctggtgcaccaacccccagggctgcgaccgcatcctgtgccgccagggcctgggctgtgggaccacctgctccaagtgtggctgggcctcttgcttcaactgtagcttccctgaggcacactaccctgctagctgtggccatatgtctcagtgggtcgatgacggtggctactatgacggcatgagcgtggaggcgcagagcaagcacctggccaagctcatctccaagcgctgtcccagctgtcaggctcccatcgagaagaacgaggggtgcctgcacatgacctgtgccaaatgtaaccatggattctgctggcgctgcctcaagtcctggaagccaaatcacaaagactattacaactgctctgccatggtaagcaaggcagctcgccaggagaagcggtttcaggactataatgagaggtgcactttccatcaccaggcgcgggagtttgctgtgaacttgcggaaccgggtgtctgccatccatgaagtgcccccgcccagatccttcaccttcctcaatgatgcctgccagggactggagcaggctcggaaggtgctggcctacgcctgcgtgtacagcttctacagccaggacgcagagtacatggatgtggtggagcagcagacagagaacctggagctgcacaccaatgccctgcagatcctcctggaggaaaccctgctgcggtgcagagacctggcctcctccctgcgcctcctgcgggccgactgcctcagcacgggcatggagctgctccggcggatccaggagaggctgcttgccatcctgcagcattctgcccaggatttccgggttggtcttcagagtccatcagtagaggcctgggaggcaaaaggacccaacatgcctggcagtcagccccaggcctcctcagggccagaggcagaagaggaggaggaagacgatgaggatgatgtgcccgagtggcagcaggatgagtttgatgaggagctggacaatgacagcttctcctacgatgagtctgagaacctggaccaagagactttcttctttggtgatgaggaagaggatgaagatgaggcctatgactgagggggcagatgcaggaaacacctagagcagccccagagtcacggggctgagggggcgggagctgcccctgtcatagggagggggattcccagcgtctgtagtgcttcctgtttgctgaataaaggtctctttctcacacac

SEQ ID NO: 867 - DNA, 101961 bp, Homo sapiens
gatcatgccactgcactccatcctgggcgacagagcaagactccatctcaaaaaaacaaacacaacaaactttgcctaaactggggcgtgagtactagatccactttccgttgcggaaacctggaggacttacttgccgcatttgttaaatggacagtgttggttccaacctcacggtaaagttcaagcttcatggaaacaggagtagtaacaatagccaatttcacggggctcctgtgagaacactgcaaataaaattcctaccacagtaaagtgcccagcaaatatgaccttgtagcattactgtattgcatgccttggttttttcaaagtccatagaagggaggcaatttagatgtctctgactcaagaaactgtatacttgaataaagccaaaggaagattagcaatgaaatgctggtgaattcaaatcccagctcagccactgagcagctagaaaaaccagggacaatttacttgtctctctctcagccttagtttcctcttctcaaaagtggcgatcaggacgggtgcagtggctcacacctgtaatcccagcactttgggaggccaaggcaggcggatcacctgaggtcagagttcgagaccaacctggccaacatggcaaactcctgtctctactaaaaatacaaaaattagctgggcatggtggtgggtgcctgtaattccagctgcttggtaggctgaagcaggagaatcacttgaacctgggaggtcgaggttgcagtgagccgagatagcgccactgcactctagtctgggcgacagagtgagactccatctcaaaaaaaaaaaaaaaatggtgatcatggtagtagttcccactccatagggtttttctgaggatgacaaagcactgaaagtccctagcacatgtgctcactgttaatgtcattaagaactacaggaactgggctgtcaaataattaaggtcataatctttattacatgtgtcttggagttctttgcccaattagacaaaccttcttgaaattataggcattgtttttttgtctttgtttttgtttctcctaaagcagatgacacagtgctgtttatgttggccagcacccaataagcaaataatgggaaattgattattgattatttcctcattcccaagtgaaaaggagaaaggttagtatcaatgtattctttgttttctgaggaaatcgttgggaatcctggagggctttatgtgtgggtcatatagaaaatagttctgtatgacaaaaacgatagttttggtctcaaaagcttgggctgaaaccatggctccaccactcattagctgtgtgatcttgggcaagttatttaacttctctgagtctagtttccttaatggtaaaattggagtttactatacctgtgtctcaggaaggtcaagataaatactaaaaatattagacaaaacacgattgtcttcactaaaatctgtttggcctctgtacttgcttgataatttctgagtagaattcagtcatgttggtaaattaaagttatatcacaggtatggaaaaatggaccttaagtgctttaaaatgcagttccgggtggggcggggtggggggaacttttcaacagatttatcactgaaagagctgctttattgcaaaggagatgagaaatacagtatgcacactcaatcattccaccattactacaaattataacttattaaggaactactatgtgtgtggcagacattgtattgtctccacccacacaatagcgctgtaaggtaggttttgttattttccattttataatgacaaaacctcactttcttacagagtttaagccagacctgggttgaatctgccctgttacatattaccattgtttccttgtcctcatctataaaatagaaatcataacagtgtctctcacatattattatagtattataattataataatattatatagttactgccctgtaacttaaagtctagcttgcttcaagatgccagcttcctgaggacaggaagactgtctgtcttaccctctgctgtattcctagcacctatagctatgcccagatcagtttaggtatacccaagaaatgtttgtcaaataatactattgcaaaaataacagcgattaagtgccttacttgttgtaactgtacttgttcaattgagtctatctttctgttaaacttagctcctggtaaaaaggtgtgtctagttgcaaatcttatatataaagaaacattttcttttgtttttttcctattttcaaaatatctagtaaaatagagatctgtgtgagacagatgtgcactctttaacaggttatctccacatgaaaacagagaatttattaaatgaattaatatgtgtaaaatatttgggaagatatagatgtagtataactactgatttaagagtcaagtgaagccagctaatgaaaaaatccattgatttttttaaatgttccaatggtgccatacatgtttcataattcagttttaaaattacatcatcacatagatacctattttatcctttcttgcatgatatgacttggctaataccatcagagtgaaaattggggaaattccatgacaggattattattgttgattaatttggacccaaagtatagtttgctctgctcctatatgtcaaaatcctgcctccacataccatcttattggtgttgacttggacagcattctgcagcatgattgagcttaggatgcatttttgccagagctttaatatgaaccaacaagcatacaccttgataggaaattggcacctaaaggcacctggtggaaagtacctctgtggttagatgagtaaactccagcagtgaatagggatatccggttttttgtttatgaacataaagtggcaaacaaaacaattacaagccaagaaaagtctggaagtgtcctttcatctttgagaaaaaaaaaatcagttagcagagtacttacgcagtctttgtgcagtagcaattgccaaacacccctcacaatccagattttattacttgatttttcaccaacagagaacagcgatgtaacctccttctgatttttgtgccatatgaaacagtggtgtttacagtattgaggaggaagtttctcagagttcagtcctattgcagcttgcatggaataatttgggatcttacttgtttatgtgaatattcacagattcctttagaataatgggactttccattgaaaaaaatgtaatgtgaatttccagtgatttattgatttgttttatactctgtccagttagaattctttggaagtggaatcagtccagagacggttattgagcatctactatgtgccaggcaccattcctagcactagggatacagtgatgggcaaagcagaccaggcacctagctttttggagctcaaattctactggggaagacagatcacacacatgtaaacaaagaaatagtataatttcagataggcataaaactaacatttgagctcagacttaaattgcgggaaatggtcagcttcactaacgcctggaggaaaagaggcagggggcctctctcagcatcttgagctcaaggtgtaaagagaaccacgaagagaatagcacacaggatgctgatcagatgcataaatatatttaatatttattctaaagacaaagaggtcatattccctactcccatctctaaatctaattatcaaatggctcctggttggcatgctttcatattgcagaggtgttttattttttcaagatcattttgtttagtggcacaggtgtgaaagttaagagtctaaatagacatgaagctcttaaaataagaaataaactgaataacgtcattaggattaccttctttatttccaccagttcacaggtgcaacaaggttctatgggctaagcataagaagaatgtaaatgttggtcaatttctcaaacactgcagattacatttagaagttatttgaaggccatttgatcagccaaacacagcacagacacccttgagcacctgcaaggttagaagcacatggctagcctctgttcttgtccctgaggaatctacttgctctcaaatcatgtgtttaaaatgaaacagagctggagtctgtgtgatgaacttccttgggttttacctgcccagcaaccaagatcttgtcttctgattgctgagtggttcacataggctaatctcaccctacaaggcaaagcccatgatttaggaccaatccacacattccttcctcttggctaaagttgagtgcatccacctgggatgaactcatgttccaggttagtcagatcagagtgaatgtggagacttttgctggagcaactaggaaacagaagactctttcccctgggaaggttacttgaggcccttgatttgctggggccaccaagtagagaaggctggcctcacggcaaagccagcacaaaggagagcaaaactaaaagaggagatggaggacagggaagagaagggaatgtcagatcctcatgccatcgttcagggccattcatccatctctggatttcctgtacatgagccaacaaattcctcatgttgcttattccactttgatctgagtttctcctcttgcgatttgaagaatactgactgatatagtcattctaacctatatattgctatttggattttatttatttttaatgataagaaacatcatccgggactaggaaagggtataatctttctggcctcaagcaatttaatggagcataattatgcatggacctagctagagatcccagtcctgaaatcaacagtattttatttctttatttttgttcattttacatagatgttctatccagtatgcttttcaaaaatatatttaattgttggtttggaggcataatgtggtggctacacacgtgggctccagattaggttgccaccttcattttttcacttttcagctgtgtgagcctctctgaagattcttttttaaattgggggaagcaatatttacctcgtagcgttattgtaaggattaagtaggataatataagtcagttacttagcacagtgctggcagagggtaggctcttatttaaattagctcttattattattcaattgataatatatggcccatctgatgtcacgtgctttaatctggtattatttgtgtttatcacatatgcttccttcacaaatcaaccacaagctatctgttactttgtctttccctttaggtatctctattggagatgaacgcatgttcaatacacgtggcctgcctgagtcattagcaaagtgtccaacaactctgaggtactgaaaaatgaaatgactagttaatgtagattgagagtccacatgccagtcacatctcgtctcacttaaatctcccaccaaacttctaaaaaagatgcagccgagatcatgaaactcaggaggacaccaagtcacacagcactcagttgtgatttgaacccccggggatccctgactcctgagccatcacccttgttcacattgagactgcctgtatccctgcctttccacaaagaatattcataacttgtagggcttaaaatgcgcgcccatgacttggatatgaaaaagaataactattttctatgactggcttcatctggctgtgtaacccctattcctgttgtgccacccttgggtaaataccttggagtagaatagctggctcctcttgtggttgggtgtttagctgtttaagaaactcttgagctgtttcccaatgtgattgtaccttttcacattcctaccagcagcataggaaagttctgatccctctacatcctccccaacactccttgtgatcttctaaattttagccattctattaggtgcagagttctatttattgagtcagtttttatgttgtgatttttcaggaaatctgtccatttttttctaagacattgaatcattgacatataattgcttatcatatgtctttattatctttttaatgtctgttaaagctgtaattatatcccctctgttattcctgatattgtttttgtttgtatgtgtttctcttttctttttttctttcattagtcttaccttgggtttatctattatagtcatcttttcaaagatccgactttatgaaatttctctttgtttactatttcatagatttttgctatgatatttattacttcacttgttcattctgttttgctcttaagctcccaatatctggacactgttatggatatcttatcttgtatggttattgatttccaatttaattccagtgtaactggagaacatactcttaaagcttttaatcttttaaaatatattgagacttattttttcgatccagcacttagtttatctgggggaatatgccactgagcactgaaaatgaaaatgtattttgcagttgttgagtgtagtgttctacaattatcaactgggttgttttccatttattccttctgttgttgttggtactactgctgttagaatattgctctattcttgcctttttggagggggttaatcaaatctttaagcattccattttatttatttgattgtcttctttgctataactcttatttgtttatttttggttgtctagggcaaataatttgcattcagaatgtatcaaagtccatttagagtcaaaagatgtcatggccttcaacagtacaattctagttatgcatcccatttttttgtgtgttcttgttattatatcctttacttctacttacgttatagattccagcttacaatgctgtgaattttgctttagtccttttaagaaaattacaggaattacaggaagcataactttttatgtttagccatttattgaacctttctggtgctgctccctcccactgaagatccacttgatctttctttcagccagaagaacatctgttagcctttctgggactctcgtctgctttttcacttaatccagcagtttgggaacagcatcaggcctcttgttttgtttccagttgcatcctcttaacagcacgctctaagggtgctttatccaatattgtaaaaggaaactaaagcaagatttgttttgaggattgcttggtgcccctttaaaaaaattagacaccaacccaggaaaagagttggaaaaaagtaccccaaaattttcccatttacctaggctgtctttaagaccaatatcagtcaccagcaattaccttttgttcccagacaggaaaattgaatgactgcatcaacgctaaaaagcttggattgaatcagacactttcctcagaagtgaaaaatgcctgaccacaagccctagttaatttaaggccacttagatggcgactccaggagaattccaactcagtgccccaagatttctcagggacttggatttctccctaacctactggaaaagaatttgtcatcagcaaagctcttccgtagagaaacttgagataaaatgggtctttcaacagggctgtgattgtgtgaagggatataaactggcaagaattgtgctcctcattcttgatggaaggttaacatgattaggatctccagaagtctcatatagcaagattaaattctattttgcatactgaagtctcagatactcaaatttccactagcatgttagattctcagtgtgctccctttatgtgggaaatctgtaacaaccacaaggcacactcaatccttcctcaggcataggcacacccagacccacccacatgcgcacacacccatacgtccacacgtgcacccaggcacccgtgctgcatgccctcacatgcacagccccacatgcaagcacacctccatgcaactttcctcaccaacacgaacatgcacccacattacacacccatatctattcccccacatgcacctcttcccacagacacatcttccacacatgcatgccccccgcacttgtgatttaatggcacatatgattcagaatgtctgtgaagccatttccaacctgtttttgtaataacctgtgcttctcagtccaaaagatagtggaacgtatgtttccaggaaaatatgaaacaggaatttctcaatctcctagcagcatccccaccctgctgtactaatattagtccatgttgccaatagcagcagcccatgtcagactggctgcctctcctccccacctaatccccacttttcttgtttgtaattgaagaacaaccgactgtatctcatgctcgggctgaccaatgagtaagcaaaagtgttatgcggggagacagccttctaattctgcagacattattaaaataatccaacacaggtacccgtgcaatcaattttcagtttctaggatgagagatatgtcaccttgccttcaaaaggccaaacctggctcgcttcattggctcccttctcaatgtctgatacaggacccaaaaaggtctatgcatcctgtggcaagaaggtggcatcctcacaatctgggacctgactctggtgaaaagtgttgtttagggaacagatgcttgatctttttactttcgctgctcgccaccctttaagaggaaaatcttccccaaatctctcttcaaatcaaatgccggatgtcaatggttctaaactaaagctgagcccctagaatcacctgggcagtgttttgttttattaatgctgatttctagcccctacctgagacctactccatgagactgtctggagtctctatgagccagaatttggttaaagttacctgggaaatcgaggggaagccaggtttgggaatcactggccaatatggtgatgcctgtctagagcctggacttcacaacccagtgatgtcaaccacacttattccacccatcgtgcctcgagatgtgggtccacgtgcagggggggcctctgtgcatggtggtcagagagctcgccatccctctttgtgtgctcttacccagctctccaggcagtcaagggctaaagggagaggtaggtgggagctcccttgagcagaggggcctttgtagggtgatggaggctcaagagggaatttcctgccctgttctggagcttgggcccccagtcctgcctgaagtcccagggtccacagtggcacagatagagacagctttccggaccttggagaagaatctcagtaataaccgggggcagggcggggtgctaattaccaaaggacactcactccctacagagttctcctcccgaacacaacttgatggaaggtaaacacccacacaggacatttaaataatgcccaagccggaatgcgttgataaccagtggcgtggacattcggcagctttccatttccagaacatactcgactgtggagaaaagacgatggtagctacctgagggccttagcatttgagccctggtaggtgagggaatctgtcagagtgaataataaactcagtactcccaaagaccacagcctcccttaatggtgtactccataaaccctcctgatttttttgcaagaattccacttgctctctagttctgctacttacattttccataggtagtggttaagaccagaatgagagaaacctgcttttaaggtatgagactgggcaagtgagcccatctttcttagacacaattttggcttctgtgaaatggctgtacttacttcatagaattgcttcaggaattaaataagatcatgaatataaagcatgaatatacagcatcaataaatattggcacataaatatcagtaaattactaatggtaaattactaaaaattaaattaactgaagccagagaaaagggaattccttagtttcataagaaatgtttatggtagatgttttgagaaggttaatttgtggtggaaattttggccaggtggcatttttatatgtataattttataccataattatatgtatatgtctttagaaccctccatcatgagagaagaagagaagattacttttgtgtgtgtgtgtgtgtgtgtgtgtgtgtgtgacagagtctcactctgttgccgaggctggagtgcagtggtgcaatctcggctcactgcagcctctgcctcccgggttcaagtgattctcgtgcctcagcctcccgagtagctgggattacaggcgtgcgccacaaagcctagctaatttttatatttttagtagagacagggtttcactatgttggccaggctgttcttgaactccttgcctcatgcagtcctcccgcctcggcttcccaaagtgctgggattacaggcgtgagccaccgcgcccagcctaaaagattactgaagggaatatttatataatatcttgaaaagcatgcacctagaagcaacttccaagggtcacagccacctggttagctttagagaaaaaagtgcctaaggtgttacattttcaaggatgtttgaagaatgtgagtggaattttctatgcagtttcacagggagagcaattatttgggtgtccttcagaattcaacactacatctctctcagtccatcctaatttaaggcactttccctgctgcataacttcattcatgttagttctgcttctagtggaaatggggaattcatatataatagtatttctaatgtttaggtttaattttttaaagttgtgaatttccaagctctcaccatctccttagatcttcacaagtcatgacatatataccaggttgaccaccattttacaaataagaaaattctgagagcagagaatttaaatcctgtctttattcagctcttaccataatcccccattttccatcttgagtatagtgtctttccatacctttgttgattattgagttttccttacatttagatgacaaatacgactccaaaatacacatttatcttgagtccttcgctgaccaacatttgaacctacagtatttagagaaatcctaaaacagacatttgcactaattccagaagctgaaggggctcaaaactccgggctctcagctctccagtggctagagatcatgtgactaacctcagccaatcccatgctctgtctggaggtgttcagtgtgcaaagaaacattgcagacttcagatacatttggtggcagcagccacagaattcagcgtccaatgccagcagtctgttattgcttgtaatagtgtccatgaatatgaatcaaaccagactttccctttggtataattttggccacagtttggctgcctaatttccctagatgcctgcttatttattcaggcctggttgtccagccttcttatcaattctacggactccccaatatccatcaacaaattccattgctgcataaccacgaaagacatctgttcttcataaacaagaaatgcggccatcgcaaccacatgataaataaaagaggcggtattcttcccagatgtttcagggcatcttctcttaaaccttcagagggtcctgagctgctcatttccgggacttgctgagccctgacagtaaacagacttttaacaaagactcgctaaatgttcagattttttttttttaaattaataagagaatggtccattttcttttcaaatcttaacacagagctggcaggatgtcccccatagagttcagagtcagaagttgtttttgatgcgccgacattccgtttgtgatagtcttgcctctatccggcacttcttaggcctcatctccttggcctggtttgtgcagtggttaaaaggggttgatttaatccagaccacctgagtttaaatctaactttccagctttctggctacacaaccttgggcaaattgctcagtatctctgtgtctgtttcttcatctataaaatatatagattttgataatacctacatcctaaggctatgaaaatggttaaatgagttaattcatataaagcatgtagaacagtgcctggctggtagtaaatacactgtaaatgtcgtctattaacatattatcctcacctctgatgcatacttgctcacttaccttttcttttctcaaaaccacctctcataaaataatctgaaattccttattgatctcattcaaaatctgtttctctcacaggcgtatcctcaaatgaagccttgtctctgtgaaattcctggtaagagaagttgaggcatcaatagtggatcaggaggtatttttaggggaagaggagtctcagtattcatggaactcaatgagacctccacctacacaaggccaaggctgcatatggatgtagagaaataaaactcagatgttgaaaagtatctgaagagatgatagcaaagggaaattatcttttatctttcagataaatcgtcattttatggaatgccacaggaagaagttttctttacaagttctgaagacttgtgatgaatgagtccatagtttcacctttgaaaatgtccctgggagtgtcaaccccatcacttttacttatattacactcataatcagttcatctcgccaagaaaaataatattatcctcatgcccaaacttgtgacttgatttgaaaaccagtaaatcagaaataaaacttcccatgtgtttttttcctacatgaatccaagtgactcagatattgtgttattcaataagactattaccatgactcaggtaaaagggccgtttatattttctgaagtctcaagtctagggtccaaaataaaactagcatcttttatagaataatttttctctaaaatgaaatgtgtatgtcacctggttgtcaaaatccttatttaaatctttaaggagaaaagcaatggtttggagagtggacttaagcaattgaatcttggattcaaatcatagctccagattgtatcagcctctataactaagagcaggtggcattacctttcccagtcttggctttcttattggtgaaagaaaaaaaagagaatattaccagtcttgaaatgttgttgcgtgtattcctacttagcagggtgcctggcacatatatgcaggtaatataaggctctgcttcgcttctggccaaaacttcctggcacaggaggacatggttctcagatgtgagaacatgttctgtcttctgcaggaaaccagaaggggttctcccttctttgattgcaggaggaaagaattctaatggaatccatatgttctttggccccatttaaaactccacactctggaaaagtagatggtgtcctggagtgaatcccaaagtcaggcccactggaaagggtcactgggctttctcctgcttcagtggcctgggattttaaaagttggaaaagtttatccatacaactttattggaaatgattgttttttattctattcttgcccttttatggtataaagtctttgcttttatgttgttaattttagatttaggcttctttgatttcattcacttccttaacaaagtaaaaagttggcaactctttgaagttgctgcaaccatattcccaactacagcatccttctatgagcctctgctctcttaatgggtatagcccaagggctagaaatagaccaattcttggccaggcgcggtggctcacgcctgtaatcccagcattttgggaggccaaggtgggtagatcacgaggtcaggcgttggacaccagcctgaccaacatagtgaaaccccgtctctactaaaaatacaaaaattagctgggcgtggtggcacatgcctgtaatcccagctacctgggaggctgaggcaggagaattgcttcaacctggaaggtggaggttgcagtgagctgagactgcgccactgcactccagctccggcaacagtgcgagactctgtctcagaaaaaaaaaaatagaccaattctttttctctaatcaggtaaaatgaacaaggatattttattttaattttttaaagacaaagtcttgctctgttgcccaggctgcagtgcagtggcatgatcatagctcactgcagcctcgaacacctgagttcaagcaattctcctgcctcagccaacggagtagctgggactataggggcgtgccaccatgcttgctaattttaaaaatatatgtatttttggtagagatggtgtttccctatgttgccgatgttggtcttgaactcttggcctaagcaatccctcccaccttggcctcccaaagcgctgagattccagacgtgagccaccatgtttggccccaggaaatttataactaggacaataaatgaaggcacaagagaccaatcccagttgttctatcctctactattctgtcaaccaactttcaagaaactaacattcgtgacatttataagatggtggcctctgctgcatgccaatcttgtgaagtacacacaggggcatgccaggtataagacagtaattacagtctccaacacagaacttcccggaatggaatcacggctcaaagaatcccacaaggaaagacaagcaagtgagcgtgaaaagccagatgtgaaaggcagcagaaatgcttcacgtgaagtaagtaacttatggaagctctagaaaagcaggaagggattaaacatgcattgattacgatatgctaaatgggctgggcgtggtggctcacgcctgtaatcccagcactttgggaggccaaggcgggcaggtcacgaggtcaggagatcgagaccatcctggctaacacagtgaaaccccatctctactgaaaatacaaaaaatcagccttttactcctaagcactgatttgggatttgagaaaaattttacaaaaaatcagacttttactcctaagcactgatttgggatttgagaaaaatccagctcatccgtctgatctggcctcttgatctcagaagctaggggagaccatttttgctccacacataactaaagccaatagaggaaggtggtttgcagaggtaaagaggattgaagcagttgagcagacagcacagaggagaaatgaggcaaaggtctgatgtcctaatggtttccatctgcaatctcttccaaaggcactttctgatcaagtagcaatttggactttttttagttgtaagcaacagaaactggcccggctatcctcatccataaagattgtattgcattcaaaggcttgcaaaagtgtggctagatgatcaagcttggggtgtggggaggattccaaaacggaaacccaccactgatgcatggccagaaccccccaccagaggatcctgctgtgaagaattaagagccgtggatccatcgacgccaggtcatctacccaccctctggctgctggcagtgggaagagcgagttggtgcccttccacttctgtagttgatactggggtcctgattgctaccggggtgctctggttatatatcacactccagacttggtggtgtgaaacaataacagtcttttattattatcatacctcatcatgctgggagatgactctcatctcctcactgaggtttcctgtgcagttgcagagagttggtgaccggggctagattcaccttaagtcttcctcactcaagtctggcagttgatactggctgagagctggggtctcagcagggaccattgattggaacactgctgggtgcctggacttccttgcagcacaaaaggtgggcaccaagggttaatgcccccagagagaacaaggtaaaactagattacctcttctagcccaaccttggaagtcatatggcaacttctgcttctgctgcacttttttggttagaggggactcaccagataagtccatattcaaaggaagggaagtaggcttttgatgggaggatatcaaagaatttgcagaaatgttttaaaagtacaattgcctcaacacgaaggaatctacttgatttcctaaaactagaatcctggttgctaaaggttccataagacaccccatatattgcttagcaaatcaccattcattgtttaaagtagttcaaattagtttcaatttcttgcaggcaaagacacccaacggaagcattggattccaagacattgaattccttgaaaggagagatttaaaagtacctagaatacaaccttccatatgacatttattaaaattggacaactatactttgagaaaatgattgatatgaattacagtgtgattgacctatggtctcagatccaaaccgtaaaccctacacattcccacggctaatcgttttaggaatagaccaatccccagatagtaagtgaagactcaatggattttggaagtcagtttggcacaaagaccctggaacagcttccggggctagaggtggagtttcctgttgctgaggtggaagatcacgagacaatcaagaaacatgcctcttccatggcttgaggtcaagtctaagcttgctcagtatctgttactctctgattgaacttccctttaattctcccatcagccaagctttgtctctgaggtcttataggaagtttttggcaaagtggcagaggtggtgaaggacatcatgaaaaacctggagccaatgaagcagaaagacttattctggaatacatggtgtggcatcctagaaaactctagatatgacaggtaaaaacctgtggagggaagagcgcgttaacattcaacattgaagtaagttaacctcaacgaatggttgtttggttgacaaaaaatagacccaaacagagtgatattcagccagtatcattcaaatacctgtgggttatctgaacaacattcttgctttcaatttcttaatgctcaaattgcttagacattttttctttcccaaacaggtgggtaaatctaacttttttggtgtctctcttggacatcccagttaatgctgatagttaaatttatactagacaatcccataggaagctgcccctcagagatccgcctgcttcctggagacacttctgacattcttcaaaattgccagataacatttgaatagctctgcgttagaatagccaataacccctgcattagaatagccaatgtaatcactgattcttcagctgcactccagagccttagggaataagttgcatgaaaaattttatgtgtatataatatataattatatatatatcatctacatatatttatataatatataattattattttatctacatatatttatataatataaatatataaacattagtttatatagttatagagaacagagggcatagcatgggtgagtgcccccagagagaataaggatggaacaaatatataataaatatctatatttatatatataaacaaatggaacaaatatatataaatattatatgtgtatatgtatatataataaatatatattttagatatttatgtatacattacatatataaatatatatatacatatagtgaatcaaactcgctatagcgagtgctcatgctgtgaaagatatctgggaaagagactgatggagggaaccgtatacaccccaggctagactctaagctttttgagtgtgggtgtcatatctgttttgtttgccagtgtatgcccagaacctagcacagtaagtgacacctagatgacaggacggactttgcaggcatgcagcccgtgtggtcacacagggtcctgcactcagaagatccctgcacatgactcagtgctctactgttgccatcctgaaattgttaatagtgtttgaacaagaggccttgggttttcgttctgcactgggcctcacagtctgtggttgctcctgatgacattcaataactatgtgttgcatgaatgagtcagaggccaaggccaggattatgttcctaccctacccttaaactctgggtcaaggtgagagtgttcctttaccggaatcgaaggttcgtctctcttgctctcatttgctgttttcaggctgatttttccagcaatgagtaacagcaggggccatccgtttacttcaagggaaaactctcctccccatgtgcagctggtctgacccggttctgcagcaggacaatttgccaagactttgatgcagaaaattcccttaaggggacttatttggtcgtaagtatcgtgtgtgaaagacatcaatatttaagtcctggttgggcttcatcagattcaaccctgttcttgtccagttttatcaaaatgtataaagtctaatcttagggaacaaatgtgcagtgatgctaatgaattttaatagcattggacgtctttgatgccttgtcttatgtcctcctgacctatcttgttgctctggcattaagttgacaaacagctgtggccaggtgaacctgacctcagtagtacctcatgtcctggggcttttctactggccacaggcagcacctgcagccatctagcgcaagaccaaacctgaaagtgcaggagaggtaacacctaccggggcaacccttggctgaatggggctgggtggataaatgctgtctctgtagtgaggacagttctgagggacaggtgctggagaccagagggtttgcaggaggagcaagctccagcggcccacagggtcatcagcccagtggcagcccttggaacagcttcctatcttcacctttttcacgtttcctccagcttccccagatcccttcccaccatgaactccctgcagcaagccctcgtctcaggctctgtccagacgttaatgtagccgtgacgcatcagtgagcactcttttgattttaagtgacagataactaaaccaaactttcctaagcaaatgaattcaatgactcaagtcattgaaaagttcaaggggacagctagctgagctctcagtgtgactaggggaatgctttctatcaggccctgttttatctctccctgttcctcagtttcacttctgtgttggttccgtttttaaatgagttcgctcctgatatggcaagataccagccactatgccagaactgccatttctacagcttcacagcaaataggaagagagggcttctggctcccattggaatcagaagttgaggctctgattggcctcagtttggttctgtgcttattcctgaacagtcatgtgaccatgagttgctgaatggctgacggctgttctcaggctccaccactaaggtggtatgacagtccacccagatcacatggactgatagggaggaaggggagggtcctcacattgaaatcagggctattgccagaagagcacgaaatgggtgtcgggaggcaagcaccacatgttcaggagaactaattcttcttgggcagccaatcaaatgtggagtctgataaatacaattttgcttcccattccccatcagcaaagagattattacaaaataaagtctgtaatgatgagttacagttggatataaacctattaaaataatgcattatatagattaattccctatgtatgcattattcaagtgcttttaatacagttccccccctttggggagtgggatcttaaaataaaaaggagaaaagttttcattgctatgttgtcctatatatcttgtcaaattatgcaaaaaatacatgtagacttgtttcacaaacataactagatagcataattacttgggtggtactaaaatttgtttgaacaaagttagttctaaaggaagtgaggcaggattctttttgagaagtataatatttaatttttatgggtatgggaaaatacagtgtagatgagaataactacgatttgtatccttattttatcagataacagttatataaggtatagaaacttagaggcattacccaattgtcctgagcctcctttcaccacctacaaaatgaaaattatacctatagtttgaactgaattaatttgcaaaattaatttaagaacccaaagtatatattaaatgcttaagagaaatacagcctctttttaaggccattgacaatttagggactgcccctcctcctcatgtcttcgcagacagcttttccggagcttagcaagtggtagctcgcaaagtactgaaatcttctcctaggatccatgtcctacactgctacaagaatcactgattacattggcaattcaacatttattaggtcaaatggaatccatcgtagccaggacctcagctctccttcagtatgctcagataacacctgaccgaatatgggaagaggctcattgtgtaaacacaaacgtggaagtgccttttattaaaacaagattttacctgtagaaagatttgagcattcaatttgcctcgaggtagcatctttacctggaaatgaaatctcattctgttattggagccaatgtgtttatgtcaccattggatgcaggaacaacttaaaaaataatagtatacatatgttatgattaactctaaacttttgtttactttaaggataagctaaaaaaactcactattgtcaaaaatagcttctgtaatttgttcttttcacaagaagtaaaattcttgtgttattttttattctctgtaccttgcgaataactcataacttaggagttcccaagttatgttcattcctccattgcaatctctgtcccacccttccctttctttccatttccgttgcaatgtaatgtaaggttaagagcatggaatgcaagaggtgccagtttcaactctagctctactgtttctagctctgtgtcctcgagcacattatgtcccgtactcttgcctcagttataccatctgtgtgtaataatgataatactacctcctttatagggttggttaactaatggtctgttttataaaggtctaaaaacattgtatacgttgaagggcttttaaaaatgctgtacttttagccaggtaaaaattcggttaagaattcaaactagcaaaagatgattctactttggcccaaaggcagtggtttcctgggtttgtgtcatcttgctttgcagcgtgtagacaattcttcaggagttgcagagagaaaaataacatgccagattttggggtcacagtgccatctgctgaagaaaggagtgttgctcgaacaatgagtccacatgatcacaatttgcgtaagtactaggcctagccaaaaaacaaaacaaaacaaaacaaaaagaatgcaataagttatggactcttgtacattgtagtggagtgaattcctcaacagcttacgctgtattatatattactgtattaatctctaaatacattatcacttatttattcatgcattgatttattcattagttaacatttgttaagcacctactttcctgttggtgccgcaacaacagagatgaagaaaacaggcatgatctgtttcctttggtgctctcagtttaacagggacacagaattcaaaagggaatataccagggaggcgtagaaagctgctttagggggcagcggatgctgctcttgtctgggagatgggtgcgtttgaggaaagcttgtgtcttagtcagtctatgctgctacaactaaagtcctgagtctaggtaatttataaacaatagagatttattcctgacagttctggaggctggaaaatccaagatcaaggcacctgtaggtttaatggctggtgagaggtccagtctctccttctaagatgccaacttgttgctgtgtcctctgcagggcagaatgctatgtccttacatggtagaagaacagaagagaatgaaccttgatatggtttggctgtgtcctcacccaaaatctcatcttgaattgtaatccccataatctccatgtgtcaagggaaagaccaggtggagataattgaatcaagggggcggtttcgcctactctgttttcgtgatagtgagtgagttctcacgaggtctgatggttttgtgtttggtagttcttcctgcatttattcttgatcttgccgccctgttaagaaggtgccttgctttcccttcacctcccgccatgattgtaaggttcctgaggcctccccagccatgtggaactgcgagtcaattaaacctctttcctttctaaattacccagtgttgggcagttctttatagcagtgggagaatggaccaacacaaactcgttccctcaagcccttctataagagacccaatcccattcttgagggctctgtcctcagacttaaagacccccgcctcattgtaaaaccacattggccattaaatttcaactacgaactctggaggacacattcaaatcatagcagcttccttgatgggagtaacatagacgctgagtcttaaggataggcagacggtagaatgcagctggctgaacaataggagaaaggcatcataggcagcaggaaaagcaagtgcaaaggccctgaggcaggagggagcgtgtagcattcacagaatggaggcccaagagggtgaagcacagtgagtgaggggaaagatggtccaaaacaaggtcagggagggaggctaggccctggtaagaaatttaagtgcaatgggaaaacaatgaaacatttcaaacagcgttatggaaaaaccatttgcaaaattgtttagctaaatacaaactgacagtacttaacattacccagcacagtaagattcaaaagaagtgcaaaatattcggaaggtggatttgaatgatttaagtctggggaacactgtcatgttcctcgggtgccctctgcaggcgccaaaccaaattgctgcgtgatcctggggatttgctccttcttgcctctcactcctcatggccagcatggaagaggaatctgatcaaggtttcctttttaaatcttagaaccaggagcctggagcaggtgttgcaggttttggagggcacccaggtgcgtactgccaggaaatgatgtgataacctcattctcgctttgtgacaaaatctaaattaaactgggacatgtctggacaattttgtagcttacataccaattcaaacaggttttttttttctcttcattttccagtcaatatactgaccatttctgtccttatatcttcctcacggagtgttcctgatggtagtcacacagtcttttattataattttatgagttcttgttggagcgattaatagcatttatactaataaaactttctaacatactgtataatttacttatatgttttggttatgatctttttcctatcaatagaatgtaagctacatgaggacaaagagttttgtctgttttttcagtgttatgccctcaatgctgagcacctgcccttcttggtccaagcaacatcccactgattccacagtcctcagggaccactccagcaagattcaagctctttctcccctggactcgccccagggttgcagcttctggtgctgtgactttggtcatatgtttgccaaccataagcttcatgatgccaagcaccttgtctgctttatttttctgcttgcaatagcacctagcatggtagaaatttcaaacaaacacacgcataaatgctctcatttaggtatgttaaaacagaaggctgggagttacaagttcatatacctggagggcctcacaggtgagcacatggatgggcaggtgccctacatgtacctgtgtgcgctctgtgagtgggggggtctgccaggcccaggagagagcctgctggccgaatgtgccaggccaaagcagcaccagcagctgcccatcaggcagaaacacaggtgcaatgtcaccaggatgctgattgtaccagctcaagcaaaactaaaaatctcaaatattggttccactaaagaaaaataccatatgggtcaaagaaaacatagcctggatccagtcagtgggaggccagttttcaacctggcataagggaaagtctttccaaatggtcattgttgattctcctccctgacctgcaggatccacatgcttccacttgtaccccatgcttctccccggagagccagggacagtccccagctggagaaaggaccagaaacaaaggtcggaaatgctccacatcaggaaatgagaagatgctcagcagacttgaaagtccctgtaccatgcggacttgcagaacgagtttttctgctaggagagagattagctcaaaggatagcaaggtctggggagaggagagggacaagaatgatgagaaatagaatgagaaggaaaacctctaaagcaaggggaagataggggcatcagagggagctgagtcagcaccaagactgccaggagccgccactgtcctctgtccagattcaatgacactgccctgtgcccgcagactctctgcccagtgccttttctctctgcttttgtatggtctgtgtggggaactaatgcatggagaagcgtgcaccatctcatgataatgatggagcagccaaagcctcatagagcatccgattggagccatggcttctttgagcccagccaaagggatccagcccctacctccatatcacctgttagaggagacagtgccccctagcccttctgtctctggagcccctgtctcctggtgcaatttctcagctcagtgactagctaaccaggcacttggacattaaggaagcatggtgatgaataagtgggccctgcatgaggcaggcttctcagggtttcttggcagcacatgtattagcatttggaccaatctgattttattttattattgttatttacatttatgtatttatttttaatgttgtgggtacacagtaggcataaatatttatggggtacctgagatattttgatatgggcatacaatgtgtaataatcacatcaggggccgggtaccgtggctcacacctgtaatcccagcactttgggaggccaaggcagatggatcagctgaggttggagtttgagaccagcctgaccaacatggcaaaaccccgcctctactaaaaatacaaaattcactgggtgtggtggcgcaagcctgtaatctcaactactcgggaggctgaggcaggagaatcccttgaacccgggaggtggaggttgtggtgagccaagatcacgccattgcactccagcctgagcaacaagagcaaaactctgtctcaaaaaaaaaaaaaaaaatcacatcagggtaaatagtgcatccatcacctcaggcatttatcctttgtgttacaaacaactcggttacactcttttagttattttaaaatgtacaataaattattgttgactgtagtcaccctgttgtgctatcaaatattagatctcattcattctagatgactaatttttatacccattaaccattcccacttccccgtcccctagtacccttttcagcctctggtaaccatcctactctccatttccatgggttcagttgttttaaggcttttagctcccacaaatcagtgagaacacgcaacatctgtctttttgtgcctagcttatttcacctaacataatgtcttccagttttatccatgttatagcaaatgacaggctctcattctttcttttttttatggctgaatagtactccgttgtgtataggtgccacattttcttttgtattttcattttactttaagttctgggatacatgtgcagaacgtgcaggtttgttacataggtatatgtgccatggtggtttgctgcacccatcaaccttcatctaggttttaagccctgcatgcattaggtatttgttctaatgctatccctccccttgccccctacccctgacaggccctggtgtgtgatgttcccctctctgtgtccatgtgttctcattgttcaactcccacttacgagtgagaatgtgtggcattttgttttctgttcctgtgttactttgctgagaattatggcttccagtttaatccatgtccctgcaaaggacatgatctcattcttttttatggctgcatagtatttcatggtgtgtatgtgccacattttctttatccagtctatcattgatgggcatttgggttggttccaagtctttgctattgtaaattgtgctgcaataaacatatctgtgcatgtgtctttatagtagaatgatttataatcctttgagtatatacccagtaatgggattgctgggtcaaatggtatttctggttctagatccttcaggaatcaccacactttcttccataatggttgaactaatttacactcccaccaactctttatccattcgtctgttgatggacacttaggttgtttctgaatcttggctattgtgaatagcgctgcaataaacatgggaatgcagacatctcttcgatatactgatttccttattgggggttatatacctagcagtgcaattgctggattatgtggtagctctatttttagttttttgaggaagctctctactgttctttgcagtggttgtactaatttacattcccaccaacagcgtatgagggttcccttttctccacatcctctctggcatttgttattgtctgtcttttggaaaaagcaatttttagctgggatgagctgatatctcattggagtttggatttgcatttctctgatgttcagtgatgtcgagcaccttttcatatctccatttgccatttgtatgcctgctttagaagaatgtctattcagatcttttgcccatttttaaactggactattagtttttttcctattgagttgtttgtgctcctcatatactctggctgttaatcccttttttcttgccttatttcttaattaaatattaaactaaatatttagtttgcaaatattttctctcattctgtggtttgtccaatgtaattttaaagtcctaaaagaatttaattcactgactcttcagtatgttataacctgaacttcttggctgattttatgggcctcagtgttagacagcacctaaggatgtgtcatgttaaagcctcttggtttaacctgtctttgttctcacctgccattggccacctgctccaccccagcagctcccacagtgaccagctccacaccggccatggtgtgcagacttgcagggctgcctctccgtccagttggctcgtgcttacagcctcacaccttgttcctccacctgggggcttccctgtggaaggctgaggtgagaaaaattatgggagcctcaatgagcaacctggaagtgtctgggagtgaggtccccgtggggccagcctttgaatgggaggcaggaactggcaaataagagttctccccagctgaactctcctgtgttctggttaacacagcctcttacaggacagtccccagagagggagcaaccagtcgtgcttgataccaagcaaaggtcggcttggtgaggcctcctggtatgggctctgctgccttccctgacctgcttcattccgctttttcctcgctctggctgccctgggattgtactccttaatgaagaagcagtatctaggcctttgccttggggtctgctttaaagattccggctgggatggcttctaaccattgtcattcttctcccccaggatgctttccaatttctacacatctgaaatggatgctacagtctcaaaaggcagcactaatcatggccatgggggtagttagcagtaataccaagccaggggagttcttgaagaggagatttgaaagatcataacttgggcagtggaatttcagacgcaactgggctgaactgagaaagtaatcatagctaacatttcctgagagcttacaatgcattttatttgcacgtattatctcttctactctttgcaacaagcctattagagacacattattatttttgccatgaaagtaacttgtctaacatcaaaattagaaagtggtgcaggtatgatttgaacgcaggcagtctggctccagtaagccctttattgagtcttaaacactttactcatgcaagtcaggtgacaggagctgcaatgtccactatgagctgcccactcggggacacatctgactttatacatgacttgtggtgatgggtaaagcctggtgcttaggagagtggtctctggagccaggttcaccaagagttcgaacccaggctctggtacttcctggctgctggagccttggccaagtagctttgtcctcctgaaactctatttcctctcctgtaaaatgatcgataacaatattgtgtggtatggtgaggattaaaacatttagcaaggtgcaggccacatagtatgtaccctgtcagttttgtatgttactgttactattgcattagtccgttttcacattgctgataaagacatacccaagactgggtaatttataaagaaaaagagatttgatggactcacagttccacgtggctggggaggcctcaccatcatggtggaaggcaaaaggcgcatcttacgtggtggccgacaggagagaatgagacgagagaaaggggaaaccccttataaaaccatcggatctcatgagacttattcactaccatgagaacagaatagaggaaaccgcccccatgattcaattatctcccaccaggtccctcccacaacacatggaaattatgggagctaccattcaagaggagatttgggtgggaacacagccaaaccatatgaactctcattattattatacttcagcaaaaggcaaaggttaacgtaggtgagagtttaggtcccttctggtcctaagatctatgcacctgaggattgaagtgcttctctctctcaaagcccctatgctactttcggtccccaccatacaattacatttcctcaaaattcctgctccgctgttcctcagctttcaactcagccatttctcaataaagctttgaaaaagtcagaattctttctctctttctctctctccctcccccagtttggcctcaccaagttctaaaacatgcccagatctggcccctgccttgcaccccagcctcgctccatgctgctctgtcctttctaccatgtctcaccaggctctttccctctcagccctccacccctggggtccactttcgtctcctctccccatgctgaggcctcccattttctcttagcttagaggccagctccagagctggcccccacccctcccctctgtgctctgcctcagcacctcatttatctccttcatgcacttggtaccatttgtgacaattttgccctttatttctgtctccctctccaccatttgtttcttgcagtgcttttacattgagctctggaataaacagatatcactgatggagcatctcctatgtgccagacccggtgctaagatttaaccctggaaaaacatctttattcaacaaatacttttttgagcacatatgagctacacactggaaagtcccaatactaagggcctggagagcccagaataggcaggagaacaggcgatgcccgtggcgggctaggtggttcggtggggagggcacagggtgctataaggtctcattcccctcatttaaccaaagaggaaattgggactttgagaaaggaggaggcttgtcaggggcagttctcaagctgtggcccatgaacctcgggggtccctgagaccttttcagggatccatgagggcctccctttcccaactacatgatttgtatgaggctggggtttttcatacctacaactaggcaactaaacagtgtatttggagagactgaatgcagaagtagacatgagaatgtaaccttccattaagcctgatattaaagagatcagtgaaaatgtaaaatgatgacaatcttctcaatttatttttgtcttagaaaatatagttatttttaaagtgtgatttttattaccatggaatggagttttatattattttaaatgaattaataaatacattttaaaaattctgctttaatttctaatacagcaaatatcgataaataacccacataaacaaaagttctttggagtcctcagtaatttccaggagtataaagaggtcctaaggcaaaaaaaaaaaaaaaaattactaattgggagacacaagtgtcagaatatacagtaattgttcagtaatattgctgtaaattaattaataggattgcctagtcacaacagcaaaggcatggaatcaacccagatgcccatcagtggtggataggataaagaaaatgtggtccatatacaccatggaatactatgcagccataaaaaagaacaaaatcatgtcctttgcagcaacatggatgcagctggacatcattatcctaagtgaattaacacagaaacagaaaaccaaccactcatgttcccacttatgagtgacagctaaacactgggtactcgtggacataaaggtgggaacaataaatgctacggattccaaaaacggggaaggaggcaggggaaaggggttgaaaaattacctgtggggtactatgttcactacttgggcaacgggatcattagaaacccaaaccttagcaccatgcagtatatccatgtaataaaccggcacacataccccccgaatttaaattaaaaaaaaattacattaaaagataggagtacctcctttacaccacctgaattatcatggcacataaatctcacaccctatttgccaaggccattcgttcctagctgttttacaggtaggttagctttctcaatgcaagtctgtgggacggatggagaaaaattccccgagccctttgatcctgccccagctgggccccgccgcgctgagccttgggcgcgccccctgctgcccgcggccggagccgttcgccacacccccgtgtttatgtcggtccacgggggttgcctgtccctttaattggcatgtaccaagtccttccaggtcacatttcctccctacgtcccagccgtttggactcactggccaaaagtccaagaggacggaatgtggagacagtgttgtatttttgcggggagttctaggccgaccgggagcgagagaacgctcgggggcgaagcgcgccattgcggccctccccgccgcctgcggtagtccagtcccaagatggcggccaccatgaagaaggcggtgagtggggagctcggggctctggatgctcgggcggcgccggatctcggccgctggggcccgggcgcgggatgctgggggtgcgcagctccgaagcccggcgtgggacccgaggccgaggccgaggccctgagagcggtcccgcggcaaggcctgctcgcgcctggcgccctgagcgttttcctaggcacctggccagccgaggcggggcgccggggctggggccgggagcctcgaaggacgcaggtccgcctcccgcgatgccgagggtgcccccggggagtctgaggaacctgcagccccggcctcgcccctgaggtgtgggaagccgaaggtcccgttgagtgtggttggccttgactcgggcgttgcaccggcatgatcgcattagcctcactggttatgggtagctgctgctgggagcgtggttacgggtgaggaaactgaggcccagagatggggagtcacctgcccgaggttacgcagctcataacggggacagcaggttcctgcatccccagattagcaggccccagagaccctgtgtccaacctggagctgcccatttccacgcttgatgcccctgagtccttcaggctaaaaccagtatttattgagaatggaagatgtgccgggcccagcagccggccgtttatctgttatcctccccgcaactcagcaagtgcaatgggttcctctccactttgcaggtagagaaacttagacacagagcagttagaggccctaaagtgactcagctagtaagaagcagagctggagttcaaactcaggtttgtttttgtttttctcaaagcacgcctgtgtaaccactaagccggctaaacttccatgtggggtttttaatcccgtgagccttcccagatgtgtaaagatagtcagatagaagaaaaagaaaattggagagggggaaggagataacggctgataatttggggagctttacagtgtgctaggtacagctgtaagttgttttgcgtgtattgtttattttatgttctttgagggagatactgtttttatccttatttaacaatgagaaaacaggcgcggaggcaaagctagcatttaaacacaggcattctgactccggagtctgtgttttaaactgctatagggggtctttgatgagaatctcttggctggagggatttgcgttcattccacttttaagaccacattagaacttctttgctttgcccctatccagtaccacatagtctatgccatctgtgcctggtgtagggtgacccattgcccccttttatatgaaattgagggactgccaaaaatgggaaagccccagccaactcaggatgtgttgctcaccctactattctgccatccaaaaattcttactgtgtcccagagtagggtctagggccatggtgattcaaaaaagtatgaaactttgtgagattcacttcacctctagtttgttaaattgggccctctggtgttaggtatggcctttaattccttggaagatactagttgtggttcactccgttttataggtatggaaactgaagtgcagagaggtgaagtaaatggtagaagaggaaatggcagaagaatgatttgaaccttggattttgattgcaaaatttctaattaccaactttttttttcctttcattgattcagtaaattttcgggggcacgtaatatggcgtagtctcagttttaagtggagacaactgtggtgaccagtgagaaagctcttctccccttaatctcatagccccaaagaacgtatgttccagggcagagcaggcattactcagatagtcagacagaaaactagtttctctgatgagaactgtgaaggaaaagtgcttatgaaatgagggccaaaatgaggtctgttttgagatcagagaagactttcctgggaaagtgccatttaagttgagatctgtgagattatgtaaggaaaggaagggagagttggatagggagcgaagcattctagagaggagtatctgcagagactctgagtgcatttaatacaaggaaggcccgatggcagataatcaggggaagagagtttgagccatgatgggaaaagaacttatagaggggtaggtggtggccaaaatataaaggagcttctttaactttggaggctttaagagtcacatgatagatgcagtgtcctcctgtagatgtttccagtgttaggaacaattcccgatagattagcttgcatgtacacttttcccctttgccctcactaggagaaaacatatgtgtatgccagtgagtgagagtgaaacagagagagatagccctttgagtttaattaaaagcaaatcgtacaatctggagtactttacgtttgtaacacatcgtatctctcaactggtcatgactttgctggggagagtgtttagatgagatgattcagtcctctcctctctagagttctgccttctaagatccagttcttgaccataaggagatctgcactttgatttctgttcattatcctatatacaaatgtcctttcctcagagaggctacctttgacctttatctaaagaagcctccttcactccccaggcccccaaaactttctactcctaagctgttttattttcatcatcacgtttgtcaccattgaacattatcttgttcatcttgttttttgctctcttcctccaccaggatgtatgcttgccatttgtattcatgaaagtgggatagtggctctcttgtcacagtgcatggcgtataggaaacagtaattgttaaataaactactgcatggatgaaagttgaatacaaaaattagctgggcatgatggcgtttgcctataatcccagctactcgggaggctgaggcacgagaatcgcttgaacctgggaggcagaggtcgcagtgagccaagatcacaccactgcactccagcctggcgatagagcaagactcgtctcaaaaacaaaaaaacaaacaaagaaggttgaatacaaatacaaagcaaaagtttacatcatacagacttggtagatatgtttttaaaagtaaaaataaaagactgaaattggccagaatttatttctagggacccagctgtcagtgcagactccgtgtaatacctagacttggtgtgaggcatgactgagtatggttcagtttcctcctctaatcccgtaagatattagttctcaagaaaagagcccagggaattttaatttttactttggatcccgagcaggcatatttctctttggcctagcagaatttctttctagatctggatctgttctttgtaatgatttttgataaacaatattcaggatgtaaaatgcttagctatcatttgactgactccatcatcaggctttctcctacatgttcattttatcaaccctataaggtaggaactagcctctccattttacagatgagaaacctgaggtggttccaaagaattgggtaatttgcccaaggttcctgtttgcttggattggattgcagcctgactcttcccaccactctgtgtgctgcctcagatactataggatatgagttcttcctagagttcttctgactttgagagtagctacagctggtttccctgaaggcaggagttcctaaccttttggggttgtggatccctttgagaatctggtgaaagctatgaagaccttccagaaggatgcacatactatacatgccattttgcatacagtctctgggtatatcgacctgtcaatgtccattgaccacccccaccccccagttaagaattacccacttctggctgggcgtggtggctcaagcctgtaatcccagcactttgggaggccgaggctggtggatcacctgaggttaggagttcaagaccagcctggccaacatggtgaaaccccttctctactaaaaatacgaaaattagccggacatggtggcatgtgcatgtaatctcagctacttgggaggctgaggcaggagaatggcttgaacccgggaagtggaggttgcagtgagccaagatcatgctactgcacttcagcctgggcgacagagtgagactctgtctcaccaaaaaaaaaaaaaaattacccacttcttgccaaaatgcagcttcaagaaatgtaggaatgttctaggacagtgagactaaaacagaagcctctgttagccatcaaaggcactgacatcttactgtctgctgtaaatggcactccactgggcggcatgcagtatatttgactcacacatcaactttagcccttaaccccagtgggaaaaccactgtaaagatctggataccaggggccacatgtgtgctgatgcctgtggtttggtggggctacaacaggaaattcctgctttggaaagacagaaagcagatagccaaattctctctaccacattttggaaactatgtgtttgagtctgatcaagcatgatttagattcaaattcagaaaccatgtattagccttagttatgtgccaggcagtcctgcactggatccgttcatgtgaatggctctgttgagccctcaccaagacaaatacatctataaatgcctgttgggggttcaatatttaaacaaaatggcatatactcttcaggcaaacaggaactcttcagaattctctgctgtctatttgcgtagggaattgacagttctcacttaggcaaaatgacttgtgtgccaagatatagactttggtttcttgagcgtagctcagtgttccccaacttccatattcatcaaaattatgcatacggttgaacactcaaagctagacatagtgtgatgtaaaggattttttcaggctatcttctgggttgttgaggtggggcataatgcatgtgaaattgtttcttggaatgagagcctaacaaaggggaggactgtgttatattccgaccactgagctctgtattgcttgacactgcctttcaacctctgagaaataaaagttcacataccttaagtcgatggtcatgagagaccaggtcagggatggagtgtgaatgttgtgagctcattactgttactgcaaaagagccaaaagtagtgtttcagtatgaactatttttatacacacacaaatatcttttcttctttaaactagaatcaggtgctctggttttcattttataaatggaagggaaaccctaaggagagtctggttttatgttttagctttattttttaaaaatatatggtacctccttgagaatctgatgaaagcagacatcctgctgcctcttccagatgtgcctaagcctgtgtacacactcacacacacacgtgcacactcacagagacgcacgttcacattcagttaccgagaactcatggacctgtctgacctctgaagccagtctgcctgggttgaaatcaagttccaccacctactggctctgtggctttggccatattatataaagtgtacctcagtttctcaatctgtaaaatagtgctggtgatcctccctaataagatggattgcaggattagcagagataataaagtacttaggaagttttggcacatagtaaattcaatcagtgttagctatttttttattatttcattggtactttatgttatccaagtactctttatttgcaaatttgtaaatttaatcacattaaatattaatttttaaatactaaacattcaattttcatcattttttagtaaagtagaccttattaagacatttaaacaggtcctacattataaacataatttttgctgtgaatggaatagagccactgaaatgtacagtgaccctttagccagtaagctcatgcaagttttagctctaagaaaaaaaaaacactactctgagacatttaccaatatatttgaccatgtaactttttgtttcctgggtcatcttaatgaaagaatgctccaacttgagaaattctgctctgtgccaaaagttggctttttttctttccttttaaaaggacttattaattgttctttatgtttgcaatatgtttatagcttaggaattattttatggagtatcagaaaaggttatagatttacaaacaaaccttaagcttgtggagcaaaaaataaggcatttgttatgttctgtacttcttgtgattcttgactatatgagtgcaaatggcttattgagttattgttgagaaatataaaaagctaactgataacttctccgttaaaattttacaaaaacttaaacacttctttcaggctgcagaagatgtcaatgttactttcgaagatcaacaaaagataaacaaatttgcacggaatacaagtagaatcacagagctgaaggaagaaatagaagtaaaaaaggtattgaaaataattattagaagaataaaatttttttatactatagctactaaaactgaactcagttaacaagtgaatatatatttctctgggctgtttgttgcagatgaatgacgcgatccactctagttaagcagaaagtcattttttttttaagggatatgcgataacttacagagttgttgaggagcttgagtctagaccgaggttccaggaacaagtctcggagaacttggctggcggtggaacagctgttgcctccactgatcccagagtcagctgtcttcccaatgaggaagccacccttgcagacttaggaacaccaagctgctgctgccagtgccacctaccccagtaaatctggggcctgtgtccagccgtcccccttgagttgaaatccagctcaaatgcatttgattggtggaattgaagttattatcacttatgcatgctggcagaactttcattacccgcatgatttacttacaccctatcagcaagcaaggctgagaaatgtaggctggtttttttggttttgtttttgtaggaaggcagaattcacaaagtcaaaaattgttaaaatagaagaaattttgagtgaccatgtgcctgctgtccaccacagggcgcttattgtccagaggacaaagctttaggtagctctaagtgcttgcttgtgaaatgtcttctaaaaagttacaaattaaggtcttattctaatgtggtaataatacctttgtgagagggtccctcagagagttgctgtccccaaattacaattggcctttagcttctatcagagaactttgagtacattttctttgccattttgcatttatagaaacaactccaaaacctagaagatgcttgtgatgacatcatgcttgcagatgatgattgcttaatgataccttatcaaattggtgatgtcttcattagccattctcaagaagaaacgcaagaaatgttagaagaagcaaaggtatgttaaaggttaattctgaaattagaatttatatcactataaagaacatgtaattatagatgtagggaaatagtagatgctagctatagctaatatttactgccttgttatgtcccaggcatgctccgaatgctttgccagcaggattttgttgaatcataacgatgacctgttatcccaatttagggacaaagaatagaggcttagagaggttatgggatttattcaaagtgacacatagacagtggtcttctgactccagaaccttgctcaaaactaaaagtatttagaaggtatagcatatattgaagcagaaaagaaaaatcccctgtaattctgctatgcagaggtaaccattcatagtgaacattttcctgtatttcttttatgttctctctgcctctctccgtgtagtttgcttcccagttgggacaattaatgttccaggaggagcatttttgctggtttcattgaatgtttgtttgtccagcagatactcattggaagcctgctctgagcctggcacacaggcctttaaaaacatcgtttttgaagactgtttaatatcatgttgatggttatcaattggggtcacgggtcttattgttagcattaatttgtttccaatattttgctgtactaatgttactgtgagcattcttctacataaatctttgttcacatttagaaaattgttttgaggaaataattagagaaatataattactgggtcagtcagcatatgagttctctgataatatctgagacatttgatacatggtatgaaattttcagttcacatgccttcttactatttgggagggacagccacgttgtttgtctatgagaagcagatggcaattaaacctttcctaatgcttttgctaattaacctgattgcttaaaatgatagtctctcttcaaatgtcataaaaagcaaaacttcgtatgaatgaaacccacatttagtaagtcttcagaagaactatcactcctgggtctttccatgcataaatcttatatgtctcccttatgtttaaatcttttcttcttggtcaaattttgtgatttttgttctttttatttgtttaaccatttaaaaaacatttttattggaagtattcccagatagcttatggtttttgtggctattgtgaatcccctgccccatacacagatagctactgaacttttattttattttatttatttatttatttatttattttttgagatggagtcttgccctgtcgcccaggctggagtgcaatggcgcaatctcggctcactgcaacgtctgcctcctgggttcaaacaattctcctgcctcagcctcccgagtagctgggattacaggcgcccaccaccacgcccagctaatttttgtacttttggtagagacagggtttcaccatgttgggcagactggtctcgaactcctgacctcgtgctcgtgatccacccgcctcagcctcccaaagtgctgggattacaggcgtgagccaccacacccggctgaacctttctttttttactcattctagaattctagaatgaatggagtgcttactctgtatcaggttctgccatgtactagggataattggggacaacaaaacctgcctggcccctgcctgcatggagcatatagtctagatggaaagaaaaaaaagtaaacaaaactgataatgagtagaaagtgatatgaggatagaggtggctttaagaacacaggaagaggaatctacactagtctggacatcaagggtcagggaagggctcccagggaaagtgatgggataacagctgaggaataagtggctattagccagaaaggggcggcggggggcggggggttctagtcgtgagaagcaacatgtgtgaacggccataggatgacggtggtgcaaacatagacctgcaagaagatgtatttgctggagattgggagcacctgaaattgtggccacatcttggagaactccagtcagttgagttgaagaaattgtactttgtcttagcaggggtcagcaaactttctgtgaagggccagaagtaaatacgttaggttttgtgggctgcacagcctctgccataattactatgaaagcaagatgagtgaatctgcgtggctgtcttccaataaaacttgacaaaaacaagcttcaggctagattgggcctgtgggctatagtttgcccactcccgtcccagagcaaagaggagccttcagagatttttggaaaagagagagatgattggacttgcgatattaaaatgactttctagtgtcttattttacttattaaccaggttttctcggtatagaaatttagaatttatccctttctagtagccatatgtcttatttttgtttcttgttttgtaacagtgattctcaaacttagcatgcgtgagaatcacagtcaccacagggcttgttaaaaatccaggttgctgggcccgacccaaagacgatctttcaggtgggctgaggtagggccccagaatgtgtatttctaacaagttcccaggtgattttgtccctgacactggtctcggggccaccgtttgagaaccattggctagatttctaaaacggcaacactgtcagtattagatattctttggtttctaatgttagtgggtatttggtttgtgtgatttcatatttttttgtcatgtttaggaaaaaaaattgttttgatcctagccaggaaggaacttaatggcttttttttttttttttaaaacaaagagtatatgttaaaatttatttaatctattaatgagggaagcattaacattacaaaactggttttagaattgaagaggctaagtatctatagataggtaggtagaaagaattgtcctttggaattgtattttcttttttttaattataaattgacaatttataattgtataaatttatggtgtaaaacgggatgttataatttattaatacaatatggaataattaaatcaagatagttaacatgtctatcacctcaaatacttagaaaatatctgagttttcactgggcaaagctgctctttcttacaaatgaggcactttttaccactcttttccaaagtttagctccagaggcctcaaagttagtgaaaatttctgccagatttggatcataagttgttcttcttaattattggtggttggtggtgtgagtttctatcatttcctgtagtctcatagttatttttgttgttggaaaaagctgggttagaagccagcaggcccaggataaactatttatagaagtctttgtatttggttctttgttaggaaataatttagacagtaattttttactattttttagatcagcagaaactgagaaaacaaacttgatttattctgtgataagcagatatggaccatgaattaaaaatgcccacattcagacatttagatctaattatcagtgttacttagctgcctgtccaagtttagaaggttcttgacctaaaattcttcccaaatattatttcagacacagatgctcagaaatcatcctattgaatagaattaatttaaaatattttttttccagaaaaatttgcaagaagaaattgacgccttagaatccagagtggaatcaattcagcgagtgttagcagatttgaaagttcagttgtatgcaaaattcgggagcaacataaaccttgaagctgatgaaagttaaacattttataatactttttttatttgtttaataaacttgaatattgtttaaaatgataattttccttcttcaaatgacatggaaagcaaaactttcttttttaaaaattttcatttatttaatggaaacttgcccattttcacatgtctgcttatttattttatatttttaaaagaagacagtattcacctatgtattttgcataacgattatatcaagtctaggggcttcatgtcatgttattaaaatcagttaagcaatcttttatgtttctatattatttagaatatttgttgttgcaattttcacataagaaaatttaacagttgtgtcatgttgtttctgtctgattttaattgctgtctaatgacggggaaagcacgatgaaaagatgtacaatcctgcatccttgcttatttcacaactaaagctttgtcatagacttcaaaatatatatgtatatattttatttaaatatatgttacatattatatttaaacatacatatttaacattttttacatatctatcaatatcagagatttgggtaaaagaatgggtaatgtttaaacatgtggaggcatgtggagctttatacaaacagggcagaaccacagaagaacgttttagaaaccaagagatgtgcagaaagaaatgtttagtgttttttcgttttaaattttagattttattttagtgctttgtaattaattggggtttatattgataaagatgtggaagttaaacagctatgtatgtaaaagtaaggcttatttcttaaataaaggatgcatttcttcccactcccccacaaaagacaaacattttgggatttgggagacctaaatgtattaactttccagcagatggcactgatgtgccaaatgtgaatggaaggatcctaacacaacaatgagattgttaggattaaatatacataattttagaggaaatatttttaatttttaaggctaaactgcatatgtattttttggttcagtgtttataaacatgaattcaggcttaaagatagatgattatataatttctaaaattcttaatactataaaggcagttttttcttttcttttttttttttgagatggcatctcactctgttgtctaggctggagtgcagtggtgcgatctcggctcaccgcaacctccacttcctgggttcaagcgattctgccaccttagcttccagagtagctgggattacagggacttgtcaccactcccaaataattgtatttttagtagagacatggtttcaccatgttggccaggatggtctccatctcttgatcttgtgatctgcccgcctcggcttcccaaagtgctgggattacaggcgagccattgtgcccggccaaaggcaaatttttaaattgctgcaaaaatcttcccaaatagtgatattccagttctggaaaatgactcttaccaaaaaaatgcaaggatatttttttcttgcatccatttggttaatgttcagttagaggattgaggctggggaggtagtcaatcaagttgcagcaggaaataagatcagaataatttgaggaaactctcaccaaagttaacaatggtgccgggtgaccactagggtccttttggaccctcaaaggccaggggagagagcaactgcccacttcactccctgaccagggaaagttgcttttcatctggggaggaacacagccagcctgtgtcatacctgcagtggtagagccaggggactagacatcctgacctcattctccctccaaaatccacctgtgtcccaccattggccaaacccaaccagaatccggaggtggtccatagaagtcagtcgcctgcagggcctgggaggggtggggaatggataggtctggggatcccccagtggaagatctagcataggagggcgactaaagtttagccctttagaaatgttaacaacgaacactcgcctgacatgggccaagagactgaactatgtaattcactgggacttcaaattttgtcctgcatattatcaagaaaacctaatacaaaaacccaaatatctaacatcagtgggatggaagcgtgtgatgttgctaacttcattttcttaacttacctgtgacattttagaacattacaaatatttgattcccattttaagttcatttctaaagcctttgcttatttttgtgaatagtaacttccctgggctagctgaagactggggaacagcacgcggtgcatctgaagggaaaggaagaaatgtcagcttcagccagtagttgcgacagagggaagttttgatctggatttgtcactaacttcttttttttttttaagcaggaatcttgatttgcatgtgcaatcactctttttagactgggccactatttgttttttaaagcagtgcaggctacacaacagataattgcacaacagatctggccctgagactgccaggttgcaaagtcaggtgcataatatgatacgtcatgtgcaggcttttcacaggaagtggtagtagaagtcttctgagcagctatgctttgctgctgactgtaatgtttcattatctctcacatccattaatttctttccatctccacaactactgtgatccttgtccaagccttgtgagctctagtcaaaagcatggctaagtaagggagcaaggggatggaaaagccatttgaggtagggtttcgacagggggtctctaaagggttttgaatagaaaggagcagtactttttaataatttggcagttgttaggtgggctttactgtagaaagatggaggtagaaatactggatgttattgtaccttttctggtgagccgaatcagttggctgaagaaaagatacaccaggacttagagaaggggtgaaatgaacaaattttgtcaatgattggagaaacgaaggtgaagctagaaggagaaacccaaagagaagttggttttgagcacaggccagtacagcttgcaacaggttttctttggcttctatagtttaacaaagaaaaaaaaaaccctgaatttgttgccacaatcaaatccagagatctcacataaaaatgcacggtttggcaacattgaaaccatatttctaaaaggcagtcttcagctgctcatgcgttagacaaagcaggctgtctccagttcaccccagtccccacctagcccactaccctcatttatattacctgcgtggtgcctgtctgtatttgctttgtaatctctggatgcctgctggtagtgtaagcagaggcaggaaagaaagaagtgtctggtttgcaggaagcagggcagaggagggggagggtgagagaagggcacgagcttggcatcagcacttggacttcccagggcatcagccacgtggagacatgtaattggcaaccggaaaagtgtgttgaagtttaggatatgcgggactagggaggtatatttgagaacccttttcatcctacagaagggcttaacatttaacgcacataaaaatcacccggggattttgtgacactgcagactctggctccgtgtgggctcgggctgagatgctgcctttctaacaagctcccaggtgacgctgctgctgctgagccctggtgccatgcattggacagctaaggtagcttgccacgaagaagaggacgtggggaaaatgcaggtgggaggaaaaagaaacagcaaaggagacagaagctgcaacggtaatgggagatccgcaagagtgtggaatcccagaagccatgatgagaatgctgaaaggaggagggagtgtgatcaacagcaaatagtacagtggcgaagccaataagagccgagaagatggagctctatttgatgactaagaaggcccttatttccttcaaaagagttaacccacccctactccttacacacaaactggagctccaaacaccctagaccccctgacccgaggcccccacacctgagccccatacccttgaaccccacacacacctgagccccacacacacctgagccccacacacacctgagccccacacacacctgagccccccacacacctaagcctcacacaaagctgagttcccataaccctgagccccgaaacctaagtttccccacccctaagacccccacatttgagccccacacacccgagtcctacatataactgagtccccatacacctgaggcccccagactggagcccccatatactcaagccctcccacacacgaactccccacagagctgagtctccatgtacctgatctccccacacctgagctcccatatacctgaaccctacacacacctgagacccccatacctcagcccctcccacatctgagcccacacacacctgagttccacacacacctgaggaatcagctccctcccgtcaggcaccagtgattctcgggggtgataattgtgtggtttgaaaaagcctgaacacattaggtgctgaggatcaaaaatacatgaacaattctctagttcagcgtttctccaggtgtgaacatggaaccaacatcacctgggaacttgttagaaatgccaagtttttcacaggactaaaccctgaaaaaaaattcccccactgggcaatgatattgagcaacataatggtcattgccttcaaagatgacttcatagcaactctgcagacagggcccagggttttaacaagcactccaggtgattctgactcagcgaaagagctggtggggttcaaatcattccatctttctgggattggagggcgtgggggtggtgttgggggaagagactggagcaccaactgagaattcttaatgcagattatagtgctggagagggtaacaaaagagggcagcatcaaagagattgacccatccagtttagggatcgagggtagctagaagcattccggttgctggtagtaaacagattataaaagattaagcagtaggtggtgtgagacttggaggcagcaagtgaaaagtatttttacaagaaagttaacagtggtgggaaagaggcagagcatcacttaatgtcactgtggtgcagatggaaaggctttttttttttttttggactagggaacacatgaatacacacagtagatgagaaggagccaggaaagaagatgatggaaaagtcaacggacaagaggtaatagttggagcacatctgtgaaagaaaggggtgctgtagtgcttatacaaacggtagactgggaaaacacagaattaggtgtatatgttacaaaaactcctaaggaataaatggtagagaaaaaaatttagaatagtgatgaactgtaggaggaagatatagttggggtaggcaaaaacaggaggaggcttcaataatctttatgttctatttcttaagttgggtcatgggtccatagttattggtagtcaatatgtttattattaattattttatgtacatgaaattcttcacaataacaagtttttttataaagttctgttgtggcacaaacaaactaggaaaaatgtgcattactgtggcattgttattgatatttctgtattgcattcaactacttttttgtcatttgacataaaatggatcatggtgactctccagttttgttttgtttttttcttatagagacagagtcttgctctgtcacccaggctggagtgcagaggcatgatgttggctcagtgccaacctccgccgcccgggttcaagtgattctgttgcctcagcctcccgaatagctgggactacgggcccatgccaccatgtcctgctaacttttttgtatttttagtagagatggggtctcgccatgttggccaggctggtctcaaactcctgacctcaggtgatctgcccacttcggcctccgaaagtgctgggattacaggtgtgagccacggcgcccagctgactctccagttttaaaagtagaaaatcagcaacaaccaaaaagttaaaagttggcttacagatttggtatagaaaattgtttgtgcaacagtcattagcatccgtttgtatgtagaaatttctggtaactaagttctttgatcctccattctggtatctaggaataactctagtgatggcgacgttaacaattagctttgagtgcttattgtaggctgtcagtcttctgaattttttttatatattccttcctcacaagagccctttaaagtagattctttaccatccctcattgtgcagaagtagaggaaggtttagagacgttaacctgccccaagttttgcagcttacttagcaaatgggtggttaatgaatgcacaagttgtacttttgaaatttattttgttagatgattttatttgtgttctgttacttatccaaaggaatttcagatcggttctcatatagacatataaaagtatatgtgtgtatatataaaaatgtaaatatagcattaatagattaggaaaaaagaaagggagaataagttggtcacagagtccacctttcagattgatgtactctgaacctctatgtagctaagacagagaaggaaaaatgatgagtaataccacattggaaagggtgttatatatgaatatctcaggagacaaaacatctttcagaggtctaaaccttaaaaaaaattttccctcattaggcattgactttgagcaatgtatcagatgctaactttaacaaagacttcaaagcaaaggcaagagcaaaattcatatggccaattcttgtagcaattaaacagttaacctaaatccaagggaaataatttagaaagaggccgataatacgcagccaacatccacagatgtaccctgagctaggcattagatatcttatgtaccctgagctaggcattaggtaagtattcacatacattaatcattacaaggtacaaactagtattatcatcatgtccatttacagatgaggaaacagaagcccagaccaaagttccaaggcccctaagtgaggagccagaactcaaacccaaacagtggggcttccaatctgtcctcccaaccattctattgcaatattgaagaatcttcttacaatcttcccagatccaaggacagtccataggtcacttcaaactcagaatttctcttcaaataggaattagagagcagaataatgatggcctttgtctatgaattaaattaaaagaccttcttcctaggaacccattttaattcagtcctataagatagcaaaggtatcagattatacccacagaacacctggaattctgaacttgaccactgtgcacaataatattgggggccaggcttggtgagccaccatacaccatatggagtatggaggctaggggtgggtagatcacttgagtttaggagctcaagaccagcctgggcaacatggtgaagacttatctgtacaaaaaacacaaaaattagctggatgtgtggtacatgcctgtggtcccagctactaggaagactgaggcaggaggactgattgagcccaggaggtcgaagctgcagtgagccacgatcatgccattgcactcagcctgggtgacagagcaagaccctgtttcaaaaaataaaaattataaaaggaaaggaaaggaagaaagaaaagtattggggagggataggttctattgggaagggacaatgaacaccacagccataaattctgattaattttgtaataatacctctgacattcacaatcttattgtaacttggagtaacgctggaattattggtagagttcgataaaacctatagtaacacagatgagcaagtgtactagaaaactgaattaaacttttctcagggtgtgatactgatggaaaataattgacctgaagaggacttgcagttaattaataatctattaataattgttttaaatcatttgactcaaacttataaagtccaaattatagtagctgatagtggcataagaactgctacactcatgcaaaaatatgaaacttatgtccaagaatcttggtctgcttcacctctcccatccttgtcgctaccaccttgggctaagaggcagtgagtgtttatttggactattgctggtgtcttctgatgggtctcccagcctccattcttactcacacacgtccccttcaatccatttttgtagccagataatctttctcagactgcaaatctaattatgttactctttctttgataaccacctcctcccccctccccccaaaaaaattaatgttctcccccttggtgagagtagtgaaaatgaaaacacctgacacagcctgcttggtctgaaccctatctacttttccacttcccctttgctctccacaccaaccacaccagccttatgccagttccccaggtttattatgcaccctttggtcatagaacctgcatccttaccaggtcaaagccccagatatactttcatagttccacatgcttctcctttgttgcaagaacagctattacatttatattgatcattgcaaattattgacttgtcttcctcattagactgaaatcaggaaccatgataatgctttgcttattcccatcttcccagcccctgcctaccatgaaatcaagcacacgacagtgctcaatctacactggaatccaacagttctgcttgatatggtttggctttgtgtccccacccaaatctcatgttgaatcgtaattccgaacgttgggggagggatagggtagaaggtgattggatcatgggggcagatttccctcttgctgttcttgtgatagtgagttctcgtgaaatctgatggtttcaaagtgtgttgcacttccccctttgctgtctgtctctcctagtcacccatggtaagatgtgcttacttcctcttcgccttctgccatgattgtaagtttcctgaggcctccaggtcatgcttcctgttaagcctgcagaactgtgagtcaattaaacctcttttcttcataaatgactgagtctcaggtagtcctttatagcagtgtgagaatagactaatatactgctcctagatgtgtacctaatagacatgaaaacttgtgtccatcaaaatacgtattaaagaatgctcatgcaatagtcctggtttaccctagggggataatgtgcccaggccatgcttgaaaccatggatggtactctatatatataccattttttcatatatatatatatctccatacctatgataaagcttaatttacaaattaacacagtaagagattaataaaatagaacaattataaaaacatactgcaataaaatttatgtgaatctgatctctttgtctaaaataatattttattgtgctgtactacgggtaactgaaatctcacaatgtgaaactgcagataagtggggacttacttgggtagttttattctgaacagccagaacctggaaacaataatattatcaacaggagaatggacacatacattgtggtctagtcatacaatggaatacaacacagcagtgaaaaagaacatctcattatgactgcaaaaaaaaaaaaaaagcctgaatcttacagacatattgttgagtaaaaaagccagacacaaaatagtacattctgtattattccacttatatgaagtttagaaacagtggagggtagggaaaggtcaccgcttagtgaaggctaatagtaacaactatttatatggaacatttacaaaatcaccagcactgtgcagagaatttgacatgatcctaactaagtcacctccccagagcttaccctggatttttttattatccccattttttagattaagaactaaggctgtgagcagggaaataccttgcccaaggctacattgctggtaagtgcaactctgcacaatctcacggtatcctgacaattactgttagtcatttcttacagtgctgcacaagacacgtctgtcattgttttgccagaggactgtgtgagataagatgctgagcattcccccacaaggcctaagacatagtaatgactcaataaatatcatctattatgatcagtcccatgaaaataaaaatagaggctccacgaggtggctcaaggccatatagctaagtggcattgcatttgtgcagttttgattgtgagttctattgttcaaattgattctaagtgacttacatagttactctaaatgcagcaccacgctatgattttcatgggtgttgagtatttttgcctgcctgagccccttctttcataagccaaatattaaaaagcatattttatgactgccttgggacaggcaaatgtaacccaggctggattatattcaccctactttctgattttaaaagaaactaaacattttcataggcccttaaggtgccatgggccctaggcattctgcctcctgtgcctaacagggaagtaggccctgcctcaatgcagatgagattgtcacgtgctgggtgaggatggtgggtttcttctggggagtggaagaggctgtggttgaaaaagacaactgaagatgaattctttgttgatgagattatatttgtcttgttcttttttaaaaaatagccatacataaatgatttagccaaaggcatgaaatgtcatttgggttcaagtgattgtgaagcgtttttgatttaacaaaaaatcataaaatgatccagaaaaaataggagactgcaattcatagaaatgctattttgtgcgattttatctgatttggaatggggttgaggagaagtaattgatgaaatgttatgaaatgctagaatttaaataggcctgatgtaaataatgaagcatgctttcaggctttcaaaatacacaattctagtctcagtttaaaaagtggtcagttggagccaatctaaacatatatagagactgatagcagcaaccatggcatagaatacatgtttccttcaaagttttaaattacctgtttgcctagagtctgaaccctgctagaaggcctttgaaaaagcattgaagggggagaaaaatccctcaaacaacttacatagtatttgtccatgggatttgaatggctcttagctagtaactggtgtttgcaatcttttatggaggtctttaaaagcaaacaaacacataagaacaggggactgaagtagtatactgaacacattctgaatgttatggaggacacaacaggatacttacacatcttcattttgtgcacttaaccatgactgcgtgctgcacaagacaatgggtaagtgtaacatatgagttaattttggcattatggctgctattaatgcaaaaccaggacaacacaaagacaatatcacacctttccattctgtcaagaatggtgggtgcaagtgctctcaggacccagtaatagaagagcagatgaatgtaaaaccaacaggaaagccatcatcagtgcaaagaaaatgggtgcagagataattttttttttttttttgagatggagtctcactctgtcacccagctggagtgcagtggcgtgatcttggctgactgcagcctccgactccctggttcaagtgattctcctgcctcaacctcctgagtagctgggattacaggtgtgtgccatcatgcccagctaatttttgtatttttagtagagatggaatttcaccgtgttggccagaatggttttgatctcctgacctcgtgatccagcctgcctcggcctcccaaagtgctgggattataggtgtgagccaccgttcccagcccaaatgagataatcttactctgaccccaggtgtgttcagaccagaagagctacggctggatctcacccagatgtctctgatgactgtggggctcacatcagtgaatgaggcagggtgggctggtcacagctatcttgcttagagggagcagaactctctaggtgaccacagttttatacccaccctgattgtctcaacaatgaagtcgctgtggcttttatggaagagcaatttctaggttgtctttcattttatgttgatatcatggtttttagagtacttggcagtgggggagacggtgatgacaggcaaagatgtgtcgtacaagaggaggaaacagccctgtggcttcagccagctgttgccatggtggaatgtgggcaagactggccaagctttctgactgtccaagaaaagccagtaatctgaaattcttttgtgtgaaatctcccaatttctaaatgttgctgaatcattcaaagatttaaaagacattaagaagaacatgacaatgaggaaaaaatgacaaacatcagcaaaccccagttcccagactgccaattcataacccagttcacagaccaccaactcacaggggaatctgagcctttgtagaaaccagtgagggttgaacaaagccctttaataaatagtaaaaaggaaaatctcatctttcctttggaattttaaccaaacaacactatttaacaatgtgttctctatcttcaacctataggaagaaaccctttccttaacctacacaaaaagtaaataaatctacggcaaggatttttttttttttttttttttacaacatcaatgaatggtttaaatgtgatttttttagtttatgtctttcccagttgctatcatgggttaaaagagattgcagaatattgcacaaaaggaaagaaatatgaagttgcttcaaaagatgaaaaaacagtaatgggcagatttaaaaaaaaattgtcaagaaaatatccaaacaaacttaaatgtcaccagagagtttgccaataagtccataaagcaaaaagattattaacctcaagacagagctactgttgggatcacaggaaaaccatcagctgtgcaccatttttattgacacttcagggtaaactaataaaactccccatttcaattaaattttggaaactcatgttccctttttcttaaatgctgtaaaccagcttataaccacacagccccttttttctaaaatctcctcttggctgaggacgtggagccaatggcacattctagcatttttcttactatggctttcctggacacaggcggctataagacgtgatgttaatgaaagggggaattgtaactatatggttttcatttttgcaggtgagcttgttgagccattttgaaatcaagtgctcctttagggtgtgcttagtgttccttttcaggggttcctggaatcatgtccgagctgaaacagatcttggggaattttattacagattttacagactggagaattgaggcccagaatgtctaaccctgccagagccaaagagcaagaaggagtcaacttcaattccatgtctttggtaggcatccttctaaattgactcccacttacccctgcctcctggtattcatggctctgtgtagtcttcttcctttgaacgtgggctggacctagtgacatgcttctgatgaatggaacacagcagaagtgatggatgtcacttctgtgtaagtcacaaaagactgtggctgccatcatgcttgccttcgctttttctgacacacatactctctctctctctctggctcttctcacatgcttgctctaataaagccagctggagaggcccatgggacaaggaactgagggaggccatccaccattgcaatgaaggaacagaggccctcagcccagtcaccctggagggactgaattccaacaacaactatgagtgagcccagaattggagccttcagatgagaccacaaccctggctaacaccttgattgcagctttgtgagagatcctaagccagaggcccccagctaagtgatacatggatttctgacccacagaaactgtaagttactctatttccatagtttggggaaatttgatacacagcaatagatagctaccacgatgtccagggctcttgactctaaggccggcattctttgtttcattggctgcctttatattctttgtagatatctgcatcctattagtgatcactggcagaacaatgtactagttaatgtccaggatataaagataagagtggcagagtccttagtatcactgcattttgctttaggactagaactatattttatttttatttatatatatatatatatatatatatatatatttatttaagttctagggtacacatgcacaacgtgcaggtttgttacatatgtatacatgtgccatgttggtgtgctgcacccattaactcgtcatttacattaggtatatctcctaatgctatccctcccctctccccccaccccacaacaggccccggtgtgtgatgttccccttcctgtgtccaagtgttctcattgttcagttcccacctatgagtgagaacatgcggtgtttggtttcttgtccttgtgatagtttgctgagaatgatggcttccagcttcatccatgtccctacaaaggacatgaactcatcattttttatggctgcatagtattccatggtgtatatgtgccatattttctttatccagtgtatcattgatgggcatttgggttggttccaagtctttgatattgtgaacagtgttgcaataaacatacatgtgaatgtgtctttatagtataatgatttataatcctttgggtatacacccagtaatgggattcctgggtcaaatggtatttctagttctagatccctgaggaatcaccacactgtcttccacaatggttgaactagtttacagtcccaccaacagtgtaaaagtgttcctatttctccccatcctctccagcacctgttgtttcctgactttttaatgattgccattctaactggtgtgagatgatatctcattgtggtttggatttgcatttctctgatggccagtgatgatgagcattttctcaggtgtctgttggctgcataaatgccttctcttgagaagtgtctgttcatatcctttgcccacttgttgatggggttgtttgtttttttcttgtaaatttgtttgagttctttgtagattctggatattagccctttgtcagatgagtagattgcaaaaattttctccattctgtaggttgcctgttcactctgatggtagcttcttttgctgtgcagaagctctttagtttaattagatcccatttgtcaattttggcttttgttgcccttgcttttggtgttttagacatgaagtccttgcccatgcctatgtcctgaatggtattgcctaggttttcttctagggtttttatggctttaggtctaacatttaagtctttaatccatcttgaattaatttttgtataaggtgtaaggaagggatccagtttcagctttgtacatatggctagaactaaattttaaactggccatcttaatgggatacaacagggcttccaaataagactagtttccttattgggaaaatgaatatgacaatgcctgtatcattgttctattgtaagaaataagaaatgcttacacacacacaatgctctctgtgtgctgagctctacacaaagcactttattaatattaactcatttaattctcataattttatgatgaagacagtagcatcacccttcattttacagacagggaaattgaggcatatagattttttaaaagattacactggtgaaaggggcagaaaaaagattcacacctgaggcgatcgttgagttctagagtctgtgttttaacaattttactttcttgcttttagaacaatgaagaacaatggaacaacatatataatatcttagcacagtactcaatacatattaagtgctcaatatgtggctgctattattattattaaagatacacttccattgtggcattggctggcaatggcagatcctgcatataacaaagattttatgaggttttgatgaaagctgacctgaagcactcaaattctttaggatatctgtcaagtgaaaatgccagcatttaaaaatgcttggatctaaagatatcaggatactttctattgaatgtgatctaaagcaaacaaacagctagccaaaaatttctcctctgtcttgcttaggctaagaagcaaatgtattgtcacgcataactgaacattcagaggcaggattggcttcaggcaggctggattcaggctcatacaatgtcatctggatttattcctcctgccatctgctatgctagcttcatcctaagactacattcaatagtgcccagcatctccaatccacgcccttctgtcatcatggagagatgattcagtagctccatctttatatgtttccaagtttgggccacatgaaagaatgaaaaccttgtagagcttaaaaaattaaagattcattctgattggactggcttagtcacatgcccatttctgattcatatcagagagatatggtggtttgagaccaggtcatgtgctcttctctcggaggtgtaagtggagtcacatcctgacccatgaactagagcagaatgggctactatccgagaaagtgggaactgatgtcaggggctcactgcaaaatgttgaagccttaacatatctacatgtttgatgtctagttctttatagagagtaaatatatgagtcttccatcattttgattcttgcttttgtcttgtgtactcttttgatcattatttttcatagtctgctttcttatataactcaacatttacaataaggtatcctagcaagcactttttaaaaacatatataactgcaaaaaaagaatggaccacttttctgggactgtgcctattgaagaaatgtgggctttattattatctcttagttttttgtgtaaccttttaaagtgctttatagctctctctcctcctatatttatctttcatttgaaacaagtgaaaaacgggatcaattcttggcatcagaaggaaatgaatacctagcaaaactgcatcactttggaaaccagtgcaatgaataactacccttaagctttcaacaacacaatttatagttgaattctttatacggctgacatgtcttggacgtcacacaagggattcagttacatcttgtattagttatctatggctgtgtaacaaatcaccccaaaatttagcagctagaaacaacacacatttattgtctcacaatttccgtaggtgaagaatctgggagcagctcagctggatagctctggctcagagtctctcacaagactgtactcaaggtgtcagacggggcagagtcatctcaaggctcagctgcgggaaggtctgcttcgcagctcacatatgtggccattgtcagatctcagaagctctgcttccaagcttactcacatggggctctccactggtctgtttcacgacgtggcacgtggcttcccctagagcaagcaatgcatgagagagtgaaagagagcacccaacagggaagcacaagttttctgtaacttcattttgaaaatgacatcccatcacttctgccatgttctcttcctagaagcaagctgataagtccagcccacagtcacgcggaggggattacccaaaggaaggaataccaggagactagaaggcaggacattgaggaccaccttgagagcctgcccactacacctctatactcagaggactgtgttacaggacagtttaatctctaggcaaacacagaaccaataagactataaagcaaatagttttacaagatcccagtgtggtctgtataggcatttatttttcaaaatttgattgattttttttctctttagctgacaacattgattttatttgagggagaaaaaaacccaccaacttaattattgatttcatttgaaaagactttttaacatttggagacttctggatatactttgagagtaaaaaaaagaaacagaactgaagattcacctactaaagaaatggctcttggccgggtgtggtggctcacgcctgtaatcccagcactttgggaggctgaggtgggtggatcacctgaggttgggagttcgagaccagtctgaccaacatggagaaaccccatctctactaaaaatataaaattagccaaatgtgttagctggcgcctgtaatcccagctactcaggaggctgaggcaggagaatcacttgaacccgggagatggaggttgcagtgagctgagatcacgccattgcactccagcttggacaacaagagcgaaactctggctaaaagaagaaatggctcttaattttacaaggtctgctttacagctttgtacgtataaagcatattgacacattgaaaggaaacaattgggaaatagtgaattaagaaaggctgtgtggctaaagaaaagatcacgtttaatttgatagaaaatggacttatagagatgaaaaatgctgtagaaatggaccgagacaaggcaacccaaccatttttcacttttacatgtgagtatggttttgattctattcaaactctggcttttctagaaaaaaaaaaaagagtaactggctagaaagttattcatttccctttatgcttgggaatgaaataaaatgtgttcctctttttgaagttgtgcgtgctttcctttccgtcgaggttacttatgaggcacatggaaataagggaatcaatttcttcctcttcttgtgctacaaacctttataaaggttgctataaatgtcataactgccttgtttcctgaaaagtaatttccctgtcattccgatctgttcctttgagataccatattattggtctatgatgatttctttaaagtgcgtcaaagtatgtggtttagtgtatttttcttatttcactgccttacagtgaatttctcactcacttcaaggcttgctcctaagtcaccaattattcataaaggattgcttgattttatcctcctaatgaaatgaattaaggttgaagaaaagcccttaacagagcataaaatgccaaaaagaccttaggaaattataagtccttccagctaaaatgtgaatttaactacaagaagaggaagaagcaggagaaagaacatgcttagaaatggtggcatgatgagtcctatagaggtggacagaggggaaaggaagagtcatagttcagcatttatggcttccgtattgtcaatatccatcagatgcattaaaaacaatcctagaaacgaacagaaaggccaggaatgcaacagcaatcacagtgatggtcctaaagcatctaaacctcctctgaccgcacagtgtctctgataccatgaagagtagaaggacagatgagcatgagggtaaatatacatatggaaaatgtttgtttttacttgtacaccaagaaatcactggctcaagctcacaaaatgcaatcatattttattacattttccagttattcaagactcaactataccagaaaacatcttaaaaaacacttttaaacaggatgtgaatgctttgtattacacagcttaatgtaattgatttagagtccatgaggaaaaccaattttccttttttttttgtgagacatattgatttaagggaaaaagcagtaattgattgtatctttggagatcaaaggtgagttgatgagagaggaaactggaaaggagagagaaaaagacatagatagaaagagataaaatgaggtctgaatataaacatctatttctgagatttaacttattatcactaagttttcattttccccaaatatttctcttcaaggaacagaaatcattcggattcagatctgtgtgcatgcaaagaatctgtatgtgtgctctttggctgagcccatttgtaaaataaacaagaaacatagagctgttaagaaataagatgagccaggacttacaggcacagatgtaccctcatcttttggatatttatactgagttttcttaagcactcaaaactttggaaggattttaagatgcttcatagagtcatttgtctaattggatatctaggagagcaatatctaggaagaatgcactcatttcagaaaacgaaaagttatttgtaattataatagcgggcttttctgcctctttttggaactggtagtgagcatgctggctcagttcctcaccctatgcctccttttcttgcttttaaatcttctccattatctcctttattatctgctatttattttactgaaggtaatcactgctttattaatcactgcttgagtaaccacagtgggacttgaaatgagcttgtttggattgtaaaagtcacaaatgctggtggacctcttgaaatttccctttttcccttcacttttatgagaacttccacgtgtagaaatgtcatgggcgaccagaggtggtttagtgtttctgaagcttggagaaagggaatttgaagatacttttcaggtagcatacacgtggtgtgtcacggtaaaccataagaaattctcattgcttacatgaaagagacttggtttgcttcaagagcaaaacaataaaaatggtttttgaaacaaaagtaatttaggcatccagtttgtttttcggaaataaaaactcaaatgtgaattcattttgaagctggtaattacattttgtttctaatgtagttgtaagaaagacttataaaaactggatttcaaatagcttttgcaaaataacctttgcgtttagttaaataatcagggccaggcgtggtggctcacgcctgtaatcccagcactttgggagactgaggcgggtggatcacctgaggtcaggagttcgagactagatggagaaaccccatctctactaaaaatacaaaattagccgggcgtggtggtgcatgcctgtaatcccagctactcagaaggctgaggcaggagaattgcttgaacctgggaggcagaggttgcagtgagcaagatcacgccattgcactccagcctgggcaacaagagcgaaactccgtctcaaaaaaaaaaaaaaaaaaatcagaagggaatttcaattttccttgaaatactactagatcttagaaagtaggggcgttatcaccgcaaaaacatgccaaattgtaaggaccatcgatgctaagaagagactgcatcaactaacgagcaaaataaccagctaacatcataatgacaggatcaagttcacacataacaatattaatcttaactgtaaatgtgctaaatgctccaattaaaagacacagactggcaaattggataaagagtcaagacccatcagtgtgctgtattcaggaaacccatctcatgtgcagagacacacataggctcaaaataaagggatggaggaagatctaccaagcaaatggaaaacaaaaaaaggcaggggttgcagtactagtctctgataaaacagacgttaaaccaacaaagatcaaaagagacaaagaaggccattggataatggtaaagggatcaattcaacaagaagaactaactatcttaaatatatatgcacccaatatgggagcacccagattcataaagcaagtccttagagaactacaaagcgacttagactcccacacaataataatgggagactttaacaccccactgtcaacattagacagatcaacgagacagaaagttaacaaggatatccaggaattgaactcagctctgcaccaagcagacctaatagacatctacagaactctccaccccaaatcaacagaatacacattcttctcagcaccacactgcacttactccaaaattgaccacatagttggaagtaaagcactcctcagcaaatgtgaaagaacagaaattataacaaactatctctgagaccacagtgcaatcaaactagaactcaggattaagaaactcactcaaaactgctccactacatggaaactgaacaacctgctcctgagtgactactgggtaaataacaaaatgaaggcagaaataaagatgttctttgaaaccaacgagaacaaagacacaacataccagaatctctgggacacatttaaagcagtgtgtagaaggaaatttatagcactaaatgcccacaagagaaagcaggaaagatctaaaattgacaccctaacatcacaattaaaagaactagagaagcaagagcaaacacattgaaaagctagcggaaggcaacatataactaagatcagagcagaactgaaggaaatagaggcacaaaaagcccttcaaaaaatcaatgaatccaggaggtggttttttgaaaagatcaacaaaattgatagaccgctagcaagactaataaagaggaaaagagagaagaatcaaatagatgcaataaaagatggtaagggggatatcaccaccgatcccacagaaatacaaactaccatcagagaatactacaaacacctcttcgcaaataagctagagaatctagaagaaatggataaatgcctcgacacatacactctcccaagactaaaccaggaagaagttgaatctctgaatagaccaataacaggctctgaaattgaggcaataattaatagcttaccaaccaaaaaaaaagtccaggaccagatggattcacagctgaattctaccagaagtacaaggaggaactggtaccattccttctgaaactattccaatcaatagaaaagagggaatcctccctaactcattttataaggccagcatcatcctgatactaaagcctggcagagacacaacaaaaaaagagaattttagaccaatatccctgatgaacatcgatgcaaaaatcctcaataaaatactggcaaaccgaatccagcagcacatcaaaaagcttatccaccatgatcaagtgggcttcatccctgggatgcaaggctggttcaacatatgcaaatcaataaatgtcatccagcatatgaacagaagcaacgacaaaaaacacatgattatctcaatagatgcagaaaagacctttgacaaaattcaacaacccttcatgctaaaaactctcaataaattaggtattgatgggacatatctcaaaataataagagctatttatgacaaacccacagccaatgtcatactgaatgggcgaaaactggaagtattccctttgaaaactgacacaagacagggatgccttctctcgccactcctattcaacatagtgttggaagttctggccagggcaatcaggcataagaaagaaataaagggtattcaattaggaaaagaggaagtcaaattgtccctgtttgcagagacatgattgtatgtctagaaaaccccattgtctcagcccaaaatctccttaagctgataagcaacttcagcaaagcctcaggatacagaatcaatgtgcaaaaatcacaagcattcttatacaccaataacagacaaacagagagccaaatcatgagtgaactcccattcacaattgcttcaaagagaataaaatacctaggaatccaacttacaagggatgtgaaggacctcttcaaggagaactacaaaccactgctcaccgaaataaaagaggatacaaacaaatggaaggatattccatgctcatggataggaagaatcaatatcctgaaagtggccatatgcccaaagtaatttatagattcaatgccatccccatcaagctaccaatgactttcttcacagaattggaaaaaactaaagttcatatggaaccaaaaaagagcctgcattgccaagtcaaaagaacaaagctggaggcatcatgctacccgacttcaaactatactacaaggctacagtaaccaaaacagcatggtactggtaccaaaacagagatataggccaatggaacagaacagagccctcagaaataataccacacatcgacaactatctgatctttgacaaaccagacaaaaacaagatattgggaaaggattccctatttaacaaatggtgctgggaaaactggctagccatatgtagaaagctgaaactggatcccttccttattccttatacaaaaattaattcaagatggattaaagacttaaatgttagacctaaaaccataaaaaccctagaagaaaacctaggcaataccattcaggacataggcatgggtaaggacttcatgtccaaaacaccaaaagcaagggcaacaaaaaccaaaattgacaaatgggatctaattaaactaaagcgcttctgcacagcacaagaaactaccatcagagtgaacaggcaacctacagaatgggagggaatttttgcaatctactcatctgacaaagggctaacatacagaatctacaaagaacacaaacaaatttacaagaaaacaacaaccccatcaaaaagcgggcaaagggtatgaacagacattctcaaaagaagacatttatgcagccaacagacacctgaaaaaatgctcatcatcactggccatcagagaaatgcaaatccaaaccacaatgagataccatctcacaccagttagaatggcaatcattgaaaagtcaggaaacaacaggtgctggagaggatggggagaaataggaacgcgtttacactgttggtgggactgtaaaccattgtggaagacagtgtggtgattcctcagggatctagaactagaaataccatttgacccagccatcccattactgggtatatgcccaaacgattataaatcatgctgctataaagacacatgcactcgtatgtttattgcggcaccattcacaatagcaaggacctggaaccaacccaaatgtccaacaatgatagactggattaagaaaatgtggcacatatacaccatggaatactatgcagccataaaaaatgatgagttcatgtcctttgtagggacatggatgaagctggaaaccatcattctcagcaaactatcgcaaggacaaaaaaccaaacatctcatgttctcactcataggtgggaattgaacaatgagaacacatggatacaggaagggggacatcacacaccggggcctgttgtggggtggggggagaggggagggatagcattaggagatatacctaatgtaaatgacaagttaatgggtgcagcacaccaacatggcacatgtatacatacgtaacaacctgcatgttgtgcacatgtaccctaaaacttaaagtataataataaaaagaaaaagaaagtaggggcattatgaatctacacaggtgataatatttcatagacacacacacacacagaacatcatgtaaaaactggtgaaatctgaataaagccaatatttgagttaatactataataccagtgtcaatttcctggtttgacactgtactccatttatgtaaaatacgtcattatatggggaagctgactgaagggtacacacacggtaactctctgattttctgcaacttcttgagaattcaaatttgagaaaaatgaagatcaggaacgtaagaagaaactgaagttatttagagctatgtcttgatgcttcttttctcatttctttcatacacacttcgcctaggagctttaaataccatatagatgctgacacacccaatttatatctcctgggtgtatctctcttctgagttccaaggtcatacctaattgcctgtttgacatcttctcttagtactatcacaggcatctcaaaagttttaaatccaagagtgagtttttaaaaaatttcagtagttttggggagtacaagtgatttttggttacatggataagttttagtggtgtttctaagattttaatgtactcgtcactgtacccaatatgttgcctgttatccctcacccccacaactctcccccacaacaggtccccaaagtccattatatcattcttatgcctttgtgtcctcatagcttagctaccacttatgagaaaatacaatgtttgattttccattgctgagttacttcacttagaataatgacctccagcatcatccaagttgcattcctttttatggctgagtagtattccatggtgtatatataccacatcttctttacccactcattggttgatgggcatttaggttggttccatatttttgcaattgcaaattgtgctgcaataaacgtgaatgtgcatatgtctttttaatatcatgacttatttttctttgggtaggtacccagtagtgggattactggatctaatggtagttctacttttagtttttcaaggattcctgtgagtgagtttttgagcaagttccctaaccccagatttcagctgcacgttgtacttattcaggttaagcctggaaatgatcccatctctaaccagcctctgctcccaacatccagtctaccaccaaacccaggcaattttaccctcaaagaaccgttggaaactcctaatgtatttttcttacagttttcattatggaaaatagtaagcatttacagaataaagataataccataatgaatccctgtgtagctatcacccagcctccaaaatattatattcaactcatgtccagttttattttctctcctctccatttcctccacttcagtgtattttgaagcctatctcaagtatcatattatttctgctgtaaatatttcaacatacttttctaaaaaatacaatattccttacttgaaaattataatttcttaatattatcaaatatctagtcatagtgcacatttgtatgattagcttatgatttttacagtatgttttttcaaatcaaacagtttcatacatagcaattggtggatatgtttcttatcctttttaatcatctcatttttttcttatttgtttattgaataaactaggtcatctatctgttagaatttccagccctctgcatctttatgatttcatctgtgtggctgacgtagagatgtaccacccagatcccacttcaggaaggtcttgttgcacagttgctgggaatgtgagcagcagacagattccctcttccagctttcagttccttcattatcttacttagtcatacggagcttctttgttttcttttttcttctttttttgagacggagtatcactctgttgcccaggctggagtgcagtggtgtgatctcagctcactgcaagctctgccttcccaggttcaagcgattctcctgcctcagcctcctgagtagctgggattacaggtggcaccaccatgcccagctaatttttgtatttttagtagagacagggtttcacagtgttggccgggctggtctcaaaatcctgacctcaggtgatccacccacctcggcctcccaaagtgctgggattacagacttgagccaccactcctggccagagcttctttgttttctagcatatcaaggtaattcaggatagtcttgtacatttctgccttaatcctagaattatctattttcttttaaggatttctaactccttataataggaaattatctttagggatcataatctggacacaaggagtgttctttattttctacgctgaaaacagtgatcagagccgggaaatttaaaaataggactacaagattatcacttaaacttatggaggctgagatgtgttaagttctgctgtctgcaagttggagacccaggaaagccagtggtatggtttgaaggcctgagagccagtgaactgatggtatagactctagtctgggtctgaaggcctcagaaccaagagtgctgaaggcaggagaagatcaatgttccagctcaagcaggcaggcagagagcaaattcaagcttcctccaccttttgttctattcagagcctgaatggattggatcatgcccacccatgttagagggggcatctgccttacttagtccaccatctaaatgctaatctcttctggaaacaccctcacagagatcacaagaaataatgtttaaccagctatctgggtaacctgtggcctagtcaagttgacacataaaattaagcatcacagtatggtctttaaatcagcaatggcttcacctgggagcttgttagaaactcagattttcagacccaccttcagacctattgaatcagaatttgaatttcaataagtttgagaagcactgctttaatttaacccattttattctttctcacacacgtgtagaatttttcatccgtattcattctttgacaccttttctccttctgtcatgatagcaaacattgattgtgccaacagatcaatgtgcaattgtgccaatttgcacagacactgcgtagagtgcttttgaaattatttaatactcaaagaccctttaaagaagatctgattattatctccatttttcaggagaaggaacagaggcttaggatagtcaagtaacctgcccaagttacacagcagtggtaaatccaggactgaaaaatagctggtccgattcatacattgtgtttaactactttgccatattaactccctgggatctttctaatccttcaatatttccataaaattctgtcttcttcagcccctttgctgaactcttgcagttattccattgcttctcagaagttgataaattatcctgtcttcattaatgagtcaattgttctttctctaataccccacacttgatcattaaggaatgctatgtctgaccttcaaaatattcctcgagtgtgagcactgctcattgtttagtccactgccacccagttaaagcaccattgtctcttgcctggaacataacatactcctctaattgcctcccgttcttgcttgtctacagtgtgtcaagaacagccatggtggtctcctgttcaaaatctttcaatggcttctaactgcgcttctagtgaaatccaaactaattaccaaggcttataaggctctgtattacaggtcagaaaacaatggactaagggcccaatatggcctgccactgatttgaaaaataaagctttactgtaacccagccatatccatttgtttacatatgatttgtggctggcttttcctttactatggtggcattgagtagttgtgactgagactgtggggcccacaaagcctaaaatatttcctatctaaccctttacagagaaaatttattaatccacattttagatggtctggccctgcctacctttcggacttcatctcctagctctctcccttgtgtgccctctgccctggccacaaagcctccttgctcttccttgaacatgccaagcttgcttctgccacaggatttcaacacaaaatatttactttgcctagaatgtttttatctctaagatccacatatctccctccctagcttcatccaagttctgctcaaatgtcacttcagcatggccttccctgaccaccctccctaacatccccccacccctattccatcaccttccactccttgccctgctttattcttcacggcttttatcaccatcctgcatccatctgtttgtctgtttgttaatttattgtctctcttcttccactaaaacctaagctccatggaatcaaggatcttaattgtttggttctctcttgtatctctagcagtcttagaccacataggtgcttagtttatttgttaaacaaactaacttcctaactagctattatgtgtggcaggtgctgtgctagatactaggtatacagaggtgaactcttgtttatggctctccagggcccacatgggacctggacgtggttctggaaagtgatcatcttgagcttcgtgtggcaattcctcaaagacctagaaccagaaataccatttggcctagcaatcccattactgtgtacatacccaaaggaatataaatcattctgttataaagctacatgcacacgtatgttcattgcagcactattcacaatagcaaagactcggaatcaactcaaatgctcatcaatgatagactggataaagaaaatgtggtacatatacaccatggaatactatgcagccatgaaaaggaacaagatcatgtcctttttggggacttggatggagctggaagccattatcctcagcaaactaatgcaggaacagaaaccaaacactgcatgttcttataagtgggagctgaacaatgagaacacatggacacagggaggggaacaacacacactggggcctgttgggttcggggcgtgagcagggggagggtaagcatcaggataaatagctaatgcatgcggggcttaatacctaagtgatgggttcataggtgcagcaaagcaccatggcacacgtttacctgtgtaacaaacctgcacatcctgcacatgtatcccggaacttaagaaaaaaagagatactgcaaaagtcatcaggagccagcacacctgccaggtgaaaccaggtgttctaaggcagggcatctatatttttggatttcagagaattaggtttttttctctgcattttcttcttactactggagaatgacataaggctgccaacttaattattttgtcatattggatatttcaagtaataaatctgctgtctgcaaaaagacaccttcaagataggtgaaaacatttaaatatgaactggatattagataatgcaatggaattattaatacttagtgtgacaatggaaatatgattatatctgaaaatgtcagttttgcttagagatgtatattggagtacacagggatgaaatggcatgaagcgtgggattggctttcaaataactgggcacagcaatgaagtgtggaaggtagtagtgttaccccattttacagaaaaggagagggaatctttttttttttttttttttaattttatttttatttttttatttttttattttttattttttttttttattgatcattcttgggtgtttctcgcagagggggatttggcagggtcataggacaatagtggagggaaggtcagcagataaacaagtgaacaaaggtctctggttttcctaggcagaggaccctgcggccttccgcagtgtttgtgtccctgggtacttgagattagggagtggtgatgactcttaacgagcatgctgccttcaagcatctgtttaacaaagcacatcttgcaccgcccttaatccatttaaccctgagtggacacagcacatgtttcagagagcacagggttggggataaggtcacagatcaacaggatcccaaggcagaagaatttttcttagtacagaacaaaatgaaaagtctcccatgtctacttctatccacacagacccggcaaccatctgatttctcaattttttccccacccttcccgcctttctattccacaaaaccgccattgtcatcatggcccatccccaatgagccgctgggcacacctcccagacggggtcgtggccgggcagaggggctcctcacttcccagtaggggcggccgggcagaagcgcccctcacctcccggatggggcggctggccgggcggggggctgaccccccgaccatcctcccggacggggcggctggccaggcagaggggctcctcacttcccagtaggggcggccgggcagaggcgcccctcacctcccggacggggcggccagccgggcggggggctgacccccccacctccctcccggacagggcggctggccgggcagaggggctcctcacttcccagtaggggcggccgggcagaggcgcccctcacctcccggacggggcggctggccaggcggggggctgatccccccacctccctcccggacggggcggctggtcgggcggggggctgaccccccccacctccctcccggacagggcggctagccgggcggggggctgacccccccacctccctcccggatggggcggctggccaggcggggggctgaccccccacctcgagagggaatcttttgatgaacttgccactcatcaagattacacaactagtaagaggtggagctaagagttgaactcagacaatatgaacctaaaaaccagtgttactaaatgagtcactccaatgaagaactttaactggaaatttggtgtcctacggagaggccgtagcatgcaaagatgccagctgtcctcattgatacttctacctacccttccatctgtgctcctgcctccattcccaccctcagataaggaaactcaggacctctagacatgtcaagaacatacttgagttgagagacagctctccatatagacagctctccatatagacaccaaagtttgtagccagatttttttttttcatttttttaatctttcatctccatggtgttcaatgaacccggaacataaacagacagatggtctgagtgggcgggcattttcacttaatgctaacacagttgccatcaatcccacctcttaaactaataccacctccctcttaaattaatgacgtcacaggtatgcagctccctgcagaccttggcaatcacatgggaatctttttggcacttctgagagataagatctatggaaaaaagtctcagaatctgcaaatcttttccagagaaaccttatcctgttaagaactcttggactgatagtctcttgataactgacagtgaaataacactaataataacaactaaaatgtaccgtgcatttattagtatcaggtaccatgctgagtacaaggattttcactccattctcatcaccactctgcttagtgagtaccttgtggctgttttggaggtgggaaaacttataaccagctaacgtttttacttatgaattctcttacctcaaatatttacgaagcatcttccatacttaaggcacattatgtacaacttattacagactttcaaggagcttttagccttaaaaatgggagaaattaacagcaacaataacacttacggagtttttaccatgtgtcagatgctgcgcctttcgatctttggttgtttaatgatttcaacagtctctgatatggattctcttttctgccccatattttagaaacagggaaactggagcatagataggttaagtgacatgcctcaagtcacacatgtactaaacggttagagctcagatttgaaccccagaagcctgtctgttgacctgcatgcctagccaccatgccatactggtcttccttatttaaaatgtacacatccccccacccatccccccaccaacacacactaaaaataaccagtaatgtgaaatcagcttagaataaattctattcacttttttttttttttttttttttgagatggagtctccctctgtcacccaggctggagtgcagtggcgcgatctcggctcactgcaagctccgcctcccgggttcacgccattctcctgcctcagcctcccgagtagctgggactacaggcgcccgccaccgcaccaggctaattttttgtatttttagtagagacggggtttcaccgtgttagccaggatggtctcgatctcctgacctcgtgatccgcccaccttggcctccctatttacttttttctacattcaatgagagcgtcaacatctctaggcaagaagtctcattcatatttctgtccccaggaccccagaccagtgactcagtgggtagtggtgttgattttgtaccccagggaacatttggtaatgtctgcagacctttctagttgccacaacgtggggcggggtgtgctactggcttctagtgggtaataacaaggatgctgctacccctgcagaacacacaagagagtccctgacatcagagaattccccagccccaaatcggtgatgccaaggctgagaccctgcctgagtataatgactaacaaagttaagtgttcaatatatagttttttgggtaaatttcaagtcgtataccaacaacctccaccaaacgacaatccctaaaagataacgtttgcttatctttcaaaacccagctcaagcagcaccacctcctagaagcctttctgacaccatcagacagcattttttttttctttttaaaaatcctagtaaaatattggcttattttactttctcttcacccttttcctagtcagctctgctcagggaatgcaaatgtcagcctaaggatgacactattaggccaaaagtatgtttcttcaaaagcaatgtgaaacatttcaaagttaaaaaaaaaaaaaaaaaaggaaaaacctgtgaattttccatggctttgtagctgggatttaaatcctaagtttccagtcacaagcaattatccagcttttaatgaaatgcaagccttctatctagttgctaaatctcctgagatggtttctggtttcttcagttctcagtagaaattcttttttttttttatagacaggtttattgaggtacaatttacatacagtaaaattcactcttgttaagtggatagttctatttgttttgacaaatgtacagtggtgtaaacatcacaaaaacaaactaagcacacacaaagtgttaatagtaaatgttttacattttaccacatttatttatttgtttgtttgtttatttatttgagacggagtcttgctgtatcacccaggctggagtgcgatggtgcaatctcggcccactgcaacctccacctcccaggttcaagtgattctcctgcctcagcctcccgagtagctgggattacaggttcataccaccaggcccggctaatttttgtttttttagtagagacgatgtttcaccatgttggccagcctggtctcaaactcctgacctcaagcgatctgtttgccccggcctctcaaagtgctgagattacaggcgtgagccactgtgcctggcctaatttttatttttatttttttttttcaagaagcctgtcttgcttttgtaagtattttctatctggtctatcaagacataatttacatataataaaatttaccctttgcagttctgagagttttgataagtgtatacaatcatataatcactaccaccttcatgatgaagaacatttctatcacctctaaacattttctcatacccaggtgcagttaagccccttccctcttcacacgaggggaagaggcaagggccctgagaacacctgagagcacctgacgggtgggtttctgagctggtacttttgctttttccagaatgttatagaaatggaatcatataacggtgtgtggtatttcatgcctaacttcttttgcttcacgtaatgcctctgagtttcatctatgttgttggaggtatccatagtttgttctttttattgctttttattccattgtatggatgtagcacagcttctttaattcatgagtcgataggtatttggtttgcttccagtttttggagatgatggagattatgaataaatctgctctaagtatttgcatacatggtttcattgggacataaatttttgtttttcctggataataggagtgagattgttgggtctatggtaagtacatctttaacttttataagaagctaccaaactgttttccaaagtgcttgtgctgtttcaccatcccattagcaatggatgacagtcccagccacttcacctctctgccaccacttaaaattgtcagtggtggccagacatagtgactcatgctggtaatctcagcactttgggaggctgagacgggaggatcacttgagtccaggagttcaagaccagcctggacagtacagtgagaccttgtctgtacaaaaaaaaaaaaaaaaaattagccgggcatggtggtgcatgcctatagtctcagctactcaggaggctgaggtgagaggatcatttgagcctgggaggaggacactgccatgagccaagactgtaccactgcactccagcctgagcaacagagcaagaccttatctcaaaaaaaaaaaaaaaattgccattttcatttccctgatgactaatgatgtcaagcatttttaatgtgcttatttgccatccatatatcttcagtggttatgcgcttattgaaatcttttgctcacgttttaatttggctgttttctgtgagttttgagagttctcgatatattttagatacaagcccattattagatttgtaatttgcaaatattttctcctagctgtggcttgtcttttcattctcttaacattctttcaaagagcagaagcctataattttgatgaagtccaagttatcaattttttcttttataatttgtactttttgtgttttacataagaaataattgtctagtaccaggtcataaagattttttttctcctaagttcccttttagcagttttgtttttttttagattttacatttagagctatgattcatgttgagttttgtgcatagtttgaggtataagtcaaggtctcttatttttgtatatgatgaccgactgttccaacagaatttgttaaaaagacaattgtaagttgcagggcccgctcaaaccgagtaaccattgcttaagttgttttggatagcacagggccaaaattgcaagtcatatagcccagacatgccaatgaaaaacagctttaacctcttagtatcaccagccaggcaggctggctgcattggcagcacctgggactagttaggaacgtcatagagcttgacccacctccagatcagggagacaaatttcagcgttgcctctacctccttgccagtcaacttgcagtgaagctttttcttgtctcaaaagctggtgccataataggggcttctctgcacgccaggtatgaattgactgctcaataacataatcattattcattaaattacctttgcaccattatcaaaagttaactgacaatatgtatgcagatttatttttattctgtattctgtttatggcagctttgtatctactttcttgagcaaacacatgtaccaaacacagttaacagcactttacaaataataactcatttagtactcattacaaccctcatggcatctgcttctaatggttctattttcttggcaaggaacctgaggcacggagaggctaagtagatttcctagggtcacacagcctgtaattgatggcacttagcttctattttcttctctcattgtaaatcatcctttagtataattgtggatttggttgtctgaatttttcactagttggtaagctgtttgagggtagagattgcgtctttaagctttgtggcctaagcacttagctaatgccagccttggagaacatgctccatgaaggtgtataaatgaacgaatgaatgaatgggcaaatgcacaaagtatggacgaaatgagtgctctgaaggttgtgctctttggaacctctgccactggcatcatttcccaagtgaaaaaaaaaatggctgccaacaacgcagacaaaaagctaagtgaaaatgaatacaggatctgtctctaataaaaacagaaaaagaattatgcttagaaatattcatcactggtgcacgatgatccagatttcaacagatcaaccttgatatgctgataagagactatttgtggaaagactgaaccttggaggccacactgcagggctccaccggagatatgacaattgccaacatctgtatgggaattaagggatggagacatgaggttaattgccagggctttaagaggcaggagaggaggaggtggaagaattataagaatcatggtgctgttagtgggaacagccaaggctctggagttggcaaagaagattaagctgcgggtgacaggcaggtggagggaaacccagcacatcccactggctcaaggtgacctttctttcttttcttttccttttatgattaaaggacaatcatgcttgtggttacaactgtcaacagaaaaggagggtagaaattaaaaagtctccaaacttccttggttcccctgagagagttcataagattgactttgattccagacatttttctggatacatacagtgatctatcataaatatctaactagcaggcaaatttttgtgtttccctcacctcagggagtcctcttacttccaagtctttccaaagtttctcatattccagaaaacatattttctaattttatttttattttttgcacaacgaacagctctttgttgcttactttagctgcagattagaatcatctgaagatttttgttttatttataaatgatgactgcagaagcctcagtcccagagaatctgatagctttgtttttgggtatggcctagatattggcgtgttccccacatgattctactatgcagccagatggaagtacaactgattctcaagtcaagttgcaccagaattactttatttcccttaactatggttattagccaagcccctgattagagagtctgattcagtccttttggaatggggtcagggcagtggtatttttttttctctgttccccaggtgcagctatggttgactcactgctgcctgaagcttttgcaatccatgctaatgggagatgtgttggaggggaaccttatgcaatgtgtagaaaaggaggcaaagacgttgaacccagacctggtcattctcagcaggagttcacaattgcaatttgtggatgctgtaagcatctctgtgatggtcaggagtatctacctgcaagataaaggaaaaagaattttactaatgttacatgattggctacttgatgcaggatcttacctggaggaacatcattcatttaaataaaaatgaaaacaatctgctgtgaatcactgtgttcaatcagtgcttctcaaacatgaatgtgcacaggaatcatcaggggatcttgtaacgatgcaggttttgatttggtggatctgggttggggcctgagatgctgcctttctaataagctcctggggaattgtctcgggatgacaatttgagtggcagggtatcagttcactcaaaatgtggttctgatgtgagaagcttgaatatagttattttatgcagtaagagagtgaatcatatttcaaattgactttattctctatgtatgattttaaatggatgtatagctaacataagaaatgaacatagtgaaccattcaattgtacagtttatatataccatttggcccaaatgcttttttacttacttttaaaatcttttcattaagaataaagttttgctttgagggtgggatggttggtaattttgtattctggcacatatacaatcctttagggattagcgttcataaacatagatagttctctgaaagcattgaacaggtggtagaatgaagtaggaagccggtgactgagaaaaatctaggctggttagcagatgccttcgcttggaaaatagggataatattcatacctacctcataaagttgctgtagaaataaaatggggggatacatatgcaaagcatatagcatagtgtctgctccataaaagggactccataagctatgccagttttatcactatgttaccagtccttcaggaggttatgggatgcttagaagtgtatttggaccctttcaaaacaaaatagatgagtacatgtttttcttcattaacacctacgcatttataattttatgtaaattcatgcatactaacatgtcatgcatgcctttctttagtttagtctttttattttactttgttgcttgggtcctccatcctcacatatcagcggcccgcctatgttaacctgggttcatatctagtatgtacttttaacatttattattattttattattttttctagtgtatatttttaaaacaaaaaaccctacacaaatatgcaaagtataaaatttgccaagtttttacatgtatatacacctatgaatgaatcaccaaaatcaagaaaatggaattatttttcactccccaaagtttcctcatgcacctttgtaacgcctccctatcatcccttctcaccctcttacaggtcccaggaaacactgatctgctttctgtcaccaaagagcattttgcattttccaggattttataaaattttataaaatgactcatagtatgtaatgatttttgccaggcttatttcatttagcataattatgttgaaagctattcatgtcatgatcatggatttagatagacctttcttctttacatatataggcatttaatactataaattttcctctaaatattggtttagcaaaatcccacaaatgcattttgttgtgttttcattttcattcagttcaaaatattactttccattttgattttttttcctttggtgttattaaattttcaaatatttgtgaattttccagaaatcattttgatttctaatttaattccattatgatcagaaaagaatgttttgtatgaatgaaacccttttaaatttgttgagccttgttttgtagctcagaatatgtctaccatggtaagttttcaatgtgtactctgttgttgttggatgcagtgttttaaaaaaaacatcagttagatcaagttggttgattgtcttcaaatcttctgtattctcactgattttctatatacttgttctagcaatcattgagaaggatattgatatctttgactaattgtagatttcaattttctgataatttttatcagttattacttcatgtattttgaagctctgatattgggtatacaaatatttagaattgttatgtcctttagatgaactggcccttttatcataatgaaatgatcttctttattcttagtagtattctttactctgatttagctatttcaactttcttttcacttgtgttagcatggtatgtttttttctatcctttttaatgtatttgtgtcattatgtttaaagtacatttcttgtagggggcatatatttgagtgttgacttttaaatctaatgtaacaatctgctttttaattggactatttagactgattgcatttaatgtgattattgatgtgattaagttaaatctattatcttgctatttgctttccattgtaccatctattccttgttcccttttgctttttccctgccttcttttggattaattgtatattttatatactttcacttgtcttctttattgtttcattgaccatgatattttttgttattttagtggtcattttagagtttacaattcacatttttcacttatcacagtgtactttcaggtgatgaagtatactttacatgtagtgtgagatctttacaatagtctacttctatttctccccacctgacttttatgatattgttatcatgcatgtaatgtatacatatattataaaaactagagatatatacacaaacacacacatatagtgtgtagagctatatatgcttataaataatgtttataaaatataatgaaatatataaatataaaatattgcattatttttgtttaaattataaatattttatgcttagtaatttttattttattgcatgccagatattgtgcaatatctctttttgggtagtgaatatttttgttttcaacaaaaattctcaagctttgttctaggacacagttatttatactagttaccctttatctgcagttttgccttttatggtttcagttatctacagtacagtacagtgatctctttgtatctgtgggggattggatccaggacccccaaaagataacaaaacccatggatgctcaagtctcccatataacttggcctagtatttgcatataacttatgtacatcttcctttataccttatctctagattacttataatacatagtataatgtaaatgcaatgtaaaggttgttatatgatattgtttttccatttgtattttttattgttgcttttcatttttttaaatttattttttgcatattttaaatttgcagttcactgaatctgtgtatatggaacctgtagctacagaggtctgactgtacaagaaattttgagagaaggggagagagagtgtattcacataacttttattacagtgtattgttctattttattattagttattgttgttaagctcttactgtacctaatttataaattaaattttatcactggcatatatttatagaaaaaaattctatatagagttttataccatccccagtttcaggcatccactgggggtcttagaacatattctttgcaggtgggagaattcctgtcctggaaagcagtaggattcctgcagatttcgcttttcagatctgttagcctggagaagttatccgttttgggctcattctttcccatttctgagacaagaccctctgtgcactctatcgcacgccccatgaatcatgaggtttcccatttttttctggtggcaatagagactattccccagccccgcatgagtgctgagaacagtaatctttaatgttcttagatgattttctctttggcctcaggtagtttcctaacatgtgtgaactgatttttttttttaataaatgaatatttgagggaaaccctcagcaggtcttccaagttctttttctgtgcatctttctcttctgagaaagctactgtgtcctctgagctttagccaccttggtctccccaagtatccttaactcagggagtctgcctggctcccgtaggcgcctcaggtaccagggcctggccagtctctcaaggcagttagctagaactatagtgtgcctcaccttgcttgttttccatctctcaggaccattgtcttttgttgtcttatatccattatcttgaaaagtattgtttcatatattatgtcctacattattatttttttggttgttttgggcaggaatgtaaatttagttcctggtactctatcttgattggaagtagaattacagttccttcatgctcatgtctacatcctcgtataactacatacattcatgtatacacacatgcacacatatataaatgaacatttaattatctcattctactaaaatggaattgtatacacatattgcatcttaattttcttacccatagatgccttgaaccctgtcctccacatcaatgggtataattataattcaatcactttaatgtccatataatattttgtaatatggatgtgacataattttaaaaaaccatctacttatggacacttcctttgtttctaatatttgacacttttaacaatgtagtaatgcctctctccttctctctctctctctctatatatatatatttaaaccatagcatcttaattcaacctaaaccagaaataagattggtaaacaactattttgacatgaagatactgtttttatttttttaaacaaaattttttagatcataattgtagtgatcatgatgatgataagcatgtatagaacctatgtccaagtgctttgcatgtattaactaatctaatgctaaccaacacctttgaaattctataaggtattatcactattttacaaaaaagaaactgagtcagtaaaaggttaaaccaactgcccaaagtcagacagccagtaagtaggggaggtgggttttgaagccaatctagctgcagactttgaagcatagtagcattttcatgttgttgtctgaactgtaagttgtttgattttacttaataatataccttggacatgttttcatattagcacttacagattatctcattctatcttttagctgtatttgaatataccagaatttatttccctagtcttttattgttggacattaaattgtttacagtgttctgcttttatacacaattttgcaatcaacatccctgaatatatatatgttagtttatccttgggaatttgtgtatctgatgaataaatttctagcaatagtttattcatcaaagagtatgtgcctgtatatttttagcaggtgctcaccgccttctcactcacacagatgaaatctattaagtttataaatgtaaactttcaataacagtgtgactatgggacagtgatatttaagggatattttaaagggtggtgtagacatgattcacatgttatttcacaatgacatgtcattgttttccttcttcttttcagcttcttctctttcatatttcagtatgaaatagaaaatccaacaaccctgtttccattgaaaattgccaaataaatcatcagatctttctttttagaggcgttgccttcactatctggatgtaataattataacaactgggaacctgattcgggctgttggcttctcccgacatgttcagtcataatggggaaactaagaacattttctatttccttccagcatacagcagtattaagaatcctaggaaactgacaacttcccacttctatagcatctgaaatacaacccaaaagaaactgagctcagatgtggcctcagggttggacatttgaaatggcaatgcatgggtcttggctcacagctctcagaatcccagctttgtatgtgtttcccttggacaatgtatgtgcttagtagatgaggaggaaaccgcatgcttctctccagctcggcggagaaaaatatttcttctctttttccttctaatgatttcattagtcatattgtttacattttactgaaaaaaattatatcccccctttaaaatacttgagcattgggcagttcatgtaaataataaatctgcctaagtttacaaattcttgactagaaataataaacctgggcgataatagtaaccatagaattgaacagcttttcccagaggggcactcagtggggaaatttggtaattatagttagcaaatggccctttggcaacagaatgtcttttttaaaagctcaacaaaaataattctggggaaaataaaaaggcataatctgtgaaatgctgaatgtaaactataccgcatgacctaattaagaggactgctatggaggatttttccaaaatactcaataaaatgagccttattatggcagtttgggggaaagtaagcctatttgtttcggaggtgcaaatgccagataatataatattaaaagaagatagattcaaaagcaaaagagattactgtgaagagcagataaatgaagtgtaagcacatttagtgttaaagacaatttttttttcactgctacaatatctggtactgcagacacatggaaatttaaaggtttttcccccacagtggaaacgttatgcttagattgcatgttgctcatctaatatccttgatatgagctttaataatattgaaagacttgctattcagctgcctaacagttctaaagtggatatctggcctagccaccagattgaagaatgtgaaagagcttattcagccacgttaatgaacaaagtcaatgactactccgttacttcctgtcagttcactcatccctccatccctcctcctgtctacgttttcattaaaatgttgattgaatattccctacgtctctggcactgctcaaagtgctggagctacagcagggaacaaaataaacaaggttctgttcatatggaacttacattttagtggatgttgggttggagaaatatgacaaataaagataaataagaacataatttatcaggtaagagtagatgataattaggaagataaagcctgtgaaagaaataaagcatgatggaggggtgtgtgtgtatgtgtgcgcgcgcatgcatgtgtgctactttaacaggagcaagaacaaagttaaggaataaagaaaaaaccttaaggctatcttggaggaagatcactggagatggtgcacaggccctgaggtgggaatggcttgggatatccaagagtaacaaggaggccagctggactgatgcatagttttcaaggagtagagccataggaattatgagcagagacatgtctacaagcatgattatgtacttggggccttacaggcaatggttgggcagccaatagagagttttgagtattttagtggcttgatctgatttatgttttaaaatacatttggccatccatatctgtgcattccacacccatggattctgccaagagaggactgaaaaatattccaggaaaaaaattccacaagttccaaaaagtgaaacttgaacttgtcacaagggtaaagtattgtgcaggtcttgtgttaggtattataagtaatttaaaggatatgggaggatgtgtgtaggttatatgcaaatgctatgccattttatataagggacttgagcatcttgggattttggtatatgccaggatgtggggattggaaccaatctctcatcaataatgaggaacaactatactccctctggcacttattggagtgacggtgatattctataccttgattgccatggtagttacacaactgtgtgtgtttgtcaaaacttatagaaatgtacacctggaagggtaaattttactggagataaattatagctcaataagcctgaattttaaaacgttctttatatctgctgtgtagatgatacaggggccagaatgaataaagacagactaattaggaggctatagcaaaaaatcaggcgaaatacaatgatagttttaactaggttggtagcagagattttggtgagaaatatcacggtttagggtaattttaaaaaatacaaccactgaaacttagtgataagtataaattcttctcttacttcccactcgtccaaatctcagcaaatgctgccaccacaaaccagttaactcaagccgtaatccaacgaacatctttgattaatgcatcagtcaattctgtaggctcttcttccaaaacatggcttgaattcttccatttttatttatgctaaccataccttgatagcatctctatctttggaagatgggatagcaaatcccatcatttcttgctaaaacaattgcagtatcttagtatcttgtctttgaatttattctcctaatccattgaaatatattctcagtatggaagttcaaagtaatcattttgaaacttttatgtaacaaatctttattgagtacctactatttgcttgggtaatttagaacctggagggaataaaacagaccaaaatctattgaacatgagcctgtttaagtgggtttatgaattaaaatgccaggttaacccttataaaatgagcaagtggcttagatatattcctgcaaacaggccgggcgtggtggctcacccctgtaatcccagcactttgggaggtcaagacgggtgaatcacttgaggtcaggagtttgagaccagcctggccaacatggtgaaaccctgcctctaccaaaaatacaaaaattagccaggcatggtcgtgtgcacctgtagtccagctacatgggaggctgagccaggagaatcacttgaacccaggaggcggaggttgtagtgagccgagattgcaccactgcactacagcctgggtgacagaatgagaccctgtttaaaaaaaaaaaaattcctccaaacaaactatggattgaagaaaacaccaatgaaagcacagaagtatttcatcaaaaattatccataactggtcagagagaccaaaagttaagtttcattaagtgtgatcagtaatgccctttttatgtttggaactgtttcacacattacagacattaaaacaggaagtgaaataaataactcagactgagaccttggaatagctttatcataaaatatgaaaccacaagcttcaaaaaaaatgaaagcatatttattcgaactttgcttttaccaaaaatgatttatcttccatctcatctttttataatttatttgtgagtattttataaaatatagaatgttagtataataaaacatacaatttataaattaaaaaacagccttgaattggggatggacatttgaaattttcttattaatggaatgtacaatcaaaaatgtttgtagactacaaatttaaatacttggtattacacaaatgtaatatcacttttcaaagtgtttattttttaaaaataaaacatctttttttaatccctttgaatttttacatttagaaaccatccattgcctctaccagagagctgggacgatgtggtttgcatgttgagatcaagaatccaggagaaccagccaaggtgtctgcagaatctaccagctctaaattgttggaaatgctggtggaattgaaatccccttagtgagatgcagcaactttcatctgagacatatgctgtaattagcagtttcttaattaccgagtgcttgaagtatgtcatactgggaaggggtggcgggaaaatgctgctgcgcttgaagacacaaggtgaccacgttctctcaaccagcttgagaccccaggttcactcttactgcagcacaaacacactgtggccaagagaagaccattcaaaggtaccccactgcttcctatttagagggggaaaaaggacgtcatatatccctgctcatgatggcataatttggtgttaaagtcagttgtgatggcaaagtaaagttttggtttgtttggtgagaaaactgagttcaccctcttgccaccctcttatctgtttgagccagaaacgatcccatctaccaagtgctgtctgagagccagggtccatgcccaacaattttcatgcatcgatacctttcatctcatgaagcgggcactactctgatatgcctttgctaggtaaggaagctgaaattcaaggagattttgttccttgttagtgacaacatcaaggcaaagtggctctagagcctgcctgcttagtcacaactgtgccttgtcactctactgctttgaaccaggcagctattgtgccggtggcatatatacaaggaggctgagggacagagcaaatattcaggacaagagtgagtcatgctgagggattgtggcaagaagaaggctggctgtgggtaggggagggccttgggcctggggagaacagaaattctattgaatttctaactaagtgctgggcagagtagctcttcttccttacctccttatgaaatcatcagtcaaatacactcatttcttgttaaagcattgcgagttgcatccctttgcagagatgtgtttaactcttgagccacgcttccaattgggcttggggcagaaaaggaaagtccccagatgctgtcctgttatacctgcttggcttgttttagaacaagagtctttcaagtcctgggactaatttattggcttcggttacaggggagctgcagcttaggctgcctggcttttgtaggaccacaaagaggaatctctgagatgctttgtttcttctagaataagatccagtactaaaggggaaacgtgcttctgtaacttggtcaaggtttacaaagagaaacaccctgtccctctctgcatgaatttccattggccttctatggaatttatggcttttgtaggaagggcaaaatctggcagtgggaggaaattcattagtggtatcactcttatggttaggattccatgaccttgaggcacataaatctggaaaatggcctcagtgggcatccagtgccctgataaatagacacaacactgtgagccaagatttgtagtctatggaatctccttttctatatgaggagatgtgcatcctgcatctcaggcacttatattatccagagctgcagaaacaaggttatcagtttattggttcacttacacaccttccttgcttcctttcagcttcctcacccagccttgcaatctcagctactaatgtcatccaagctaattttcagagccgggttggcagagttggcatgtaatggatggacattttgatcttggccagcacgtttctaagtaggaagtagtgtccatccattaggggtgtcaagagtttcatctctcaaaaacagccctttttgtggtaatggatagctgctctgacagcttcagaggactgaattaggatgtgtgttctgcagatatcaggaaaagaaacaggaataaaacacaattatactcaaacctataacttttgcccgccttgaatacatttagttgctcacccccaaggctggaggatacctaataaagagacattttctggttaactgacaatgttttccttttttttcttttttcttgtcttttccagcagaagtctcttgtttctgccaagaactctgaaaagttaaaaatatttatcctgcttgcaagctaacaacttagcctgctgtagtttcttagatgcaggcagaaaacatgcaactcctgggtcagagacaaaaggcttgtattactcaaggcacagcaggcagcatgatcattgtgtttgctgcaggtgccctctctccaagttccctgggagtgatgggaagcagcctgggtagatgctgcagcctcaggaggtttggagcacagctgagtttaagaaatcccaaacttgtaaagagggcagtctaacctttgcctagagagagacattatcttatagtggtcaggaaacaaacctgccctctgccccaagggagctactatctctatcttccaaggcctttcactatacaaacatccgaaaaatcgtctgaaacaaaagctactacagaatgtgcagaaatgtaggaaactcatagagaagtacctcctggtaattgcaggaaagaatttggcaaaactggttcactgatactacattacttacattttaaatatgaaatactggcagttattttcaactaaaggcaaatataaaaacactgtcattggctcaaataatagcaaacaaagagtagcatgggattttgcctaaagagtacaatctggaataatatattgtcattatatttaacatcccttcaattaaaataccaattaaaatatgatttatttcaagtaaatgtcctacttatttttaattacactatgctttgttagtcactgtatttatgttggaaacaagatcattaaagaattatttgtcttatacattgttaaataaggcaaagccccaactcacaattttctctaatttgagaagaagtgggagaaaagaaaacaatgggatattttatcgtctggaaagtggaggttcatctaagatatggctatttgcattgctcccatttttgtgaactgctgcttcatttttacaaaagaaaaagaaacattttatgaagagattaacaaaaggcaccacttcactctcttaccacttaagattcatctccatgccttttcctgtattggatattgtaattatgtgattctttcaagctgatcagcatagcatgcaagaagtgccagttctctcaaatatctctagaactatattcataaccatgattcttttcttgttttttaaattctttttttaatggctataaattaatctcagtaataattgttatttgagggttccatcgcatgtattgacgtagtcacatttccaaaatcttttaatacaaatttccgaaatgtacataacttactaaatcctgggcttattttaccaccatgctgtctcctttttcaaggataaatgcatagttccatgtgctcctttgaagcactgaccaaggagttttcttcctgtcctgaaatcatcaacaaatattcttccagcagtttttctccccttgatattttatttctctctgtggagattttaaagaaaagagggataaaaaaatctttggaagggtatgttgagattttctcttcaattatatttaagttgggatgtttgatgccaatacgacagctaaaatggcaactgacagtaatatttgttagggctaaatctactctgaatcaccataatatataaaactacaggacctcaagaagagcaaaccaccaagatgctgggcaaaaatccccaacacttgtgatagtttgctgagcatgatggtttccagtttcatccatgtccctacaaaggacatgaactcatcattttttatggctgcatagtattccatggtgtatatgtgccacattttcttaatccagtctatcattgttggacatttgggttggttccaagtctttgctgctgtgaatagtgctgcaacacatggacacaggaaggggaacatcacacactggggactgttgtggggtcaggggagggggagggatagcattaggagatatacctaatgctaaatgacgagttaatgggtgcagcccaccaacatggcacatgtatgcatatgtaacaaacctgcacgttgtgcacatgtaccgtaaaacttaaagtataataataataaaattaaaaaaaaagtccccaacactgggcttctggtctccctaacatttatcattcaagttaacaacttggaggctccccttctcatgccctcagttttgcttccacatattttttattcattgagcaatgtaattgagaattccaagctatgatgagcgaatcaccaaccatataaactcaagattgaattactaaaatgatcatcaccatcattaggctcctattgcatagaaaaatgataggcacatacttttaactatttttcaatagttctaattattttcttgagatagttctttttataaaaaagaaaagatggagattgtggattcagttgcttcaggactttaaaaaacctattaccttgtttttctaaaaaaaggtgtcactttttgcttttttcatcccacagtgattgtgcagagaactctaaaatgccactagcaagggtagtaggaattagacaagctgctcccccatggtaattgtcaaatcatcttacttatactaaagtaatgatatgtccatgtctactcatccagtctcgctgcctaggtggacaaccatccaggaagaaatagacccagaacataacaaccctctctcacaacttggaggcctggtgagtgatggcagctgatacagccatgcatcagcctagcacatcttgccacataagctggatgtgaaaacaacagcatcagaaaagacagtccagctcttgtgagtcattttcctgattgatctaatttaccttgaaggttaatgtattctaaactaattcagagattaataaccacttaaagatatatgaaagacatttcgctctctgtgagcagtgtgtcataacctcatttattgcctcttcaatgactttgggaattatttgatgagatttaaagggaaatttgattgtaggatatggagagtgacaggtgcaatacatacagggctttggaaattattcttgttaataataaaaacaagcatgtaatttgattttccataatgtgatcttcaaaagcaaatatttattttcaagctggaaatcatttttatctattgaatgagataattgaatatgctattttgctaaaaaggaaagattgcttttaacataaaaagtgacacacatgtttttattacactccatatatttaatcacaatgaacggccaattgctgagggagccttatgtgtggatatcttaaatagaggttcataaagaatgtttctgctacttgttttcaatcaactgaaatgtattcattagtagaatgtggttaaactcatttgagcatgcttaaagatggggtatccaacccaacaaatgggaaaatcatcccaacaaacctctttctcttccccttctagtgttttcctctcaaatttttatttactttattttttttgatctacttttctatttaactctacctccaatttccaagttcaaagtgatcactgataggtagtaaatgtgattgcactagcaggaaaagaagtgttatgatttataggtattggagtgatatggagtaaaaatgtggtatttctctcacctccgctttgagctatgatcatagttatttgaagagaacagttgaatttaggcttttgaacaaataatcacgatcatgatttttaccctcacctctacctcactatataggaggaatttactaagcaccttctctgccttatcttccttgttatgtatatcactcccatgagaaaggtgaccttattattcccaatatgcagaatggggagctgattttcttcctatttacctgcaattttgcctgaagtccaagaagtgctatgtaccctcatttttttcccctcaattcaaacaagtgagttgttcgagaatcattgatcgtatgggtatctctataagaagaagtctactgtatgtcctgggaggatactgcttaggctgtaaaacttttgattttgtgcctctacttatctaaagagggtagtgaagagattggaaaaaaactcatgggctgagactgggggtggcctgcaattccagtgcatgatgcaacaaagatgtgggagtttctcacatgtccttaagaagtaaggaagccagctgtgcacttttccactgatatcttcctgtgagggctgccgactagaaaaagaatctgtgggaagtggtaggtggcataagtgttgtgaaaagaccccacagacctttgcaaagcacccagacctgagagccattcaaatgctgccacacagagggcgttgacagccagtgaagagtagtaagagaagcagccaccacagagcggagcatggagactgtctatccagcaaggagacatttccctcttaatccttgtcctacatcccaacaacccaacaacccaacaacagaaacgttccagccaaggaggtgcataagaagctattcatgcccttctcaccactgcaagcacctttgcccacatgtctggcaagcactagggtaggtgaactaggtaggtgagacggcagtgagctatgattgtatcattgcaatcattgtacgacctgggtgatgaagcgagacaccatctttggaaaaaaaatttttttgaatttatgaaaaactattacgggatttggaaagagggtttcaaccactcagaagaaaatagtttatttatacccctcaaggagttgactccactataaatataaaatactatataaatttaaagattatttacctctcaactaaaatgtttattgggtataaaaaagtgccaggttgcatactgtctctttgatacaatatacaaaagaacatgtattcaatatattcaaattatgaaacatagcaataaaatgaacaactttgacctcaccacccaacttaagaaatatgctaattttattttttttgagacggagtctcgttctgttgcccaggcgggagtgcagtggctctatctcggctcactgcaagctccgcctcccagcttcacgccattttcctgcctcagcctcccgagtagctgggactacaggtgcccgccaccacgcccagctaattttttttgtatttttagtagagacggggtttcaccgtgttagccaggatggtctcgatcccctgacctcgtgatcctcctgtctcggcctcccaaagtgctgggattacaggtgtgagccaccgcgcccggctgaaatatggtatttttaaaaaaaaatttattttaagttctggggtacatgtgcaggatgtgcaggtttgttgcataggtaaacatgtgccatggtggtttgctgcacccatcaacccatcacctaggtattgagcccagcatgcattagctatttttcctaatgctctcccttcccccaccccaccccctgacaggccccagtgtgtgttattcacccacccatgtccatgtgttctcactgtttggctcccacttacaagtgagaacgtggtgtttggttttctgttcctgccttagtttgctgaggataatggcttctgcctccatctatgtccctgcaaaggacatgatctcattcctttttatggctgcatagtgttccatggtgtatatggaccacatttcctttacccagttgattgctgatgagcatttaggttgatttcatgtctttgctattgtgaatagtgctgtaatgaacatacgcatgcacgtatctttataatagaatgatttatatttctttgggtatatacccactaatgggattgctgggtcaaatggtatttctgattctagatctttgaggagcgaataggcaacctacagaatgggagaaaatttttgcaatctatccatctgacaaaggtctaatatccagaatctacaaggaaattaaacaaatttagaagaaaaatgaagcccattaaaaagtaggcaaaggacacgaacagatacttctcaaaagaagacattcatgcagccaacaaacatatgaagaaaagctcaatattactggtcattagagcaatgcaaatcaaaaccacaatgagataccatctcatgccagtgagaatggtgactactaaaaagtcaagaaacaactgatgctggtgaggttgtggagaaacaggaacactttttcattgttggtgggaatgtaagttagttcaacactgtttaatatgtattcttaatgatacaattattaagtttctgtgtgcctctctttgacctcactttctttgcctaattaatttataattatttcccattatctggagtactgtgcatgtcccctaccatctagctcattggctagcacagtgcaggtacacaaacgtttgatgaatatccttatgagggatgcagataacaatgatgaagaccatgacaataattgcctttatggagcatattccatgggccaggctctgtctttttctctgtttataatcaacacaaatattctgcaaggtattttataatattgctatgttacagctgaagacaccaaagcaatcacaagcatagtcgtttgctaaagccacacacagtcactaaatggccagaccagaattgaagccaactctttcaagtgacagagctttttctcttttcgttgtgctaacttaactcagtctcttacttctcagtgtctgttacaggatcaggcctggagtttgttatataattgatacctggagatgcctcggtggtctatggattggcacaattgtggcattgccttcccatgaattcaaggctattgctgtctttgaactgatataaactgtatttttaattggtaactagtaaaaaaggatttgaaggaaaagttccttcaggaagttaaacctggttatttatctgccacttttgttgtataaccatggaatgtacaatggcagttatgctaagtaagtgatttatctccacaagttattgattttctcatgagtcaagaagggtggaactgagcggagctatgagtgatttatggagaggtatcaataaaggataccaataagaaggtgtctccatagtcaggcccattttatgtttcctttttgccacattgaacccaaataaatgtcctaaatctatcacctgatgtgggtaccatgccccagccaactgtttagaagcgtaggtttaatcatcaacaagaaaaatttatcttgataagatcctttaaattgtacttgtcaccagaaaagtgttctttaaaaatgctacaaggtttcatatctcttctttcacaatgaattatgagctcaatttcttttaagcttgaacctttttaattggaaattcttgttgcaggatttttaacattggcagggtattctaatatcttgcttcatctccttgaatctttgttggttatctgtgtgtgtgtgtgtgtgtgtgtgtgtgtgtacctatatatgattatgttgattgtgtatgtatctatctgtctataactaaacaaataagagtgttaactgtgagaattttgtttttgtaacaataattagtttgctaaatggcttagttggggcgaatgacttaaggaaaaagaagtcccatcccatggaaactagatgcagttcatttatttgagggagatattttagtatgggttgggagtcccagccctgacatttattagtcatgtaacctcagacaaaacttgtcagccctgtctgttttcctaactataaaatgcaaagatggttcctcctagagagcttctacatcacattgactagcgccaatacaaggcttagtacagtgtttagccgatagtgactactcagtcatcaaggcacatagtgactacacaccaacaagacttgctgctcttgttttgtgtccctaggccacaccccgatgtagaagtcagcattctcgaaaaccttagttcaccaggtaagcccagctttacatcatgaattaactagtaaaaaggatattatgaaagagaccacaaaaattctcctgtggaacaaatgtctctggacaagagctagtaaataacaggcctaccaaccacatgactgagtttggagcagtttttctggtcccatttgagccttgaagtaattgcagttccctatgacagcttgaccacaacttggtgagagaccctgagctagaactacccagttaggctgctcttgaattcctaaccctcagaaacgatcaggagtaatatgtgcttgttttaagctgctgagttttggggtaatttgttttgtgacaagataccttattgtccattacaaactgcaccctatctttgctcttgacattcccagcccttttatactgcttgcttttttgggggcggggcaggtctggctctgttgtacaggctggagtgcagtggcacaatctcagctcactgcaacttccacttcccgggctcaagacatcctcccaccttagcctcccaagtagttgggactacaggtgtgcccccactacactcggccaatttttttgtattgttttgtagagatggggtttcaccatgttgcccaggctggtcttgaactcctgggctaaagtgatccacctgccttggcctctcaaagtgctgggattacatgtatgagccaccgagcccagccgcttactttcttaatatcctcctccctcccttccttccttccttttccccctttctttctctctctctttcttgttctgtagcagttggcactttctaactttttaaattcacttattatatttattgtctacatcctcctaaaatacacgttttataaaagtaaaggttttggcccatgatgttaactgttgtatcttcagtacctgtcaaatagggatttgataattgtttgttgaatgaacaaatgaataaacataagctcagataaatgaaactgtcttggtttaattgtcgtttagaggaaatttttatatttagtatatttgactgtttttgtcccagctcaggtctactctagacttggggcctttaaaaagattaagttcggagagctaagagataagattcctgcagtttgagggtctttttttttttttttttaaacctcattaaaaccttgattcttttttctatgcagttataaaccttagtaaatttgcctgctgggaaaagacagatgaaacaaatggccttctacttaaatggcttttacctgaatttaatttcatctatgtatagcctcagtataaagttgctttagaattctcttgataagaagcaatgcagaaaaaatgtgatcatcatagtggggggtgtcgggggggtagaactcagatagctttggccttcctttttttttttttcttgtttgggtccaagttttcatcttctctgcatttccaaacagatgctgaattctcgtttgtccctaatggacacatcaagtgtactctagtcgctgtgtctgctttgctgtgagtagtttgcaattcctatgattaaatatgcaattaagatttaaatacaataaagcacatgaaattttgcaattaggatgaggctgcactgctcatgacagatttaaatgtcagcgcctccagttggaattgaaagtgagattttgctctctccatttgaatttggaaaaccctccattacacattactaaccagaatcagttgagactgggagttggtatactgaaagtggttcctttcaggcttataatgcattgatcctaaataatttttggagagatgtgtaggctgccagtgtacaaatgatgcagtgcaagtgatattattttagtttgataatcaacgtgtcatagcttctctccccgcttggtacgttgcattgtaaatccgatactcacaggcaaagtccctgtgatccactatactgccttgagttgcggcaacgttattatgaaaaatacattcatttgtctatatggaagggatttaaaggttgctgcattcattttttaccgcagtctaagtacttaatcttatggacattgctcaacaagaaaatgatctcttcctctctacccccattagcaacattctttcagtctcaagaaatataaatattggggcatattaatgaaaatgacatctactgctgatatattaaaactcaaatgtgtgattaagtattctgttaattaactctttttgtcagaataattgtaaatgcgttctcatacttcagagcaatttgaactgccaggagaaggttagtagactgccctgagatagttggaaatcagacatcattagtttaattaaattccattaacataacaaaaacagtttcttcgattttttttttaaaggatc

SEQ ID NO: 868 - DNA, 3870 bp, Homo sapiens
catctgcctgcccttctgccatccgagcgccctgactgcgccacactgcaggccatggagaatgagctgccagtcccacatacatctagcagtgcctgtgccaccagcagtaccagcggggccagtagcagcagtggctgcaacaacagcagcagtggtggaagtggccgccccaccgggccccagatttctgtgtacagtggtattccagaccggcagaccgtgcaggtgatccagcaggccctgcacagacagcccagcacggccgctcagtacctgcagcagatgtacgccgcccagcagcagcacctcatgctgcagaccgcggcgctccagcagcagcacctcagcagcgcccagctccagagcctggcagccgtacagcaggcaagcctggtatccaatagacaaggaagcacttcaggcagcaatgtgtctgcgcaggccccggcccagtcatcttcgatcaacctggcagcctccccagcagcagcccagctcctcaaccgggcccagagtgtgaactctgcagcagcctcaggcatcgctcagcaggctgtgctcttgggcaacacgtcttccccagccctgactgcaagccaagcacagatgtatctgagggcacagatgctcatcttcacgcccacggccaccgtcgctactgtgcagcctgagctcggcactggctcccccgcccggccccccacccccgcccaggtacagaacttgaccctccgaacacagcagacaccagcggcagcagcctcgggccccacccccactcagcctgtcctgcccagcttggccctgaaacccacgccgggcggtagccagcctctgcctaccccagcacagagcagaaatactgctcaggcttcccctgcaggtgccaagcctggcatagctgacagtgtgatggagccacacaagaaaggagatggcaacagcagtgtgccagggagcatggaaggccgggctgggctcagccggacggttcctgctgtggctgcccaccccctcattgcaccagcctatgctcagctgcagccacaccagctcctcccacagccatcctcaaagcacctgcagccccaatttgtgatccagcagcagccacagccacaacagcagcagccgccgccccagcagtcacggcctgtgctccaagctgagccccacccccagctcgcctcagtctctccaagcgtggccctccagcccagctcagaggcccatgccatgccactaggcccggttacacccgccctgccactccagtgtcccactgccaacctgcacaagcctggcggcagtcagcagtgtcaccctcccacacctgatactgggcctcagaatggacatcccgagggcgtgccccacacccctcaacgcaggttccagcacacttcagctgtcatcttacaactgcagcctgcttcaccaccccagcagtgtgtccctgatgactggaaagaagtggcaccaggggagaaaagtgtgcctgagacgcggtctggcccatcaccacatcagcaggctattgtcactgccatgcctggtggcctgcctgtacccacgagccctaacatccagccgtccccagctcacgagacagggcagggcattgttcatgcactgaccgacctcagcagccccggcatgacctcagggaacggaaactctgcctccagcatcgccggcactgccccccagaatggtgagaataaaccaccacaggccattgtgaaaccccaaatcctgacgcatgttatcgaagggtttgtgatccaggagggggcggagcctttcccggtgggacgctcgtccctgctggtggggaatctcaagaagaagtatgcacaggggttcctgcctgagaaacttccacagcaggatcacaccaccaccactgactcggagatggaggagccctatctgcaagaatccaaagaggagggtgctcccctcaaactcaagtgtgagctctgtggccgggtggactttgcctataagttcaagcgttccaagcgcttctgttccatggcttgtgcaaagaggtacaacgtgggatgcaccaaacgggtgggacttttccactcagaccggagcaagctgcagaaggcaggagctgcgacccacaaccgccgtcgggccagcaaagccagtctgccaccacttaccaaggataccaagaagcagccaacaggcactgtgcccctttcggttactgctgctttgcagctaacacacagccaggaagactccagccgttgctcagataactcaagctatgaggaacccttgtcacccatctcagccagctcatctacttcccgccggcgacaaggccagcgggacctggagctccccgacatgcatatgcgggacctggtgggcatgggacaccacttcctgccaagtgagcccaccaagtggaatgtagaagacgtctacgaattcatccgctctctgccaggctgccaggagatagcagaggaattccgtgcccaggaaatcgacgggcaagccctgctgctgctcaaggaggaccacctgatgagcgccatgaacatcaagctggggcccgccctgaagatctacgcccgcatcagcatgctcaaggactcctagggctggtggcagccaggattctggcccagggcgcctcctcccgactgagcagagccagacagacattcctgaggggcccagaaatggggccggttggagggcaggggctctccctaggggcatagctggtgaggaggtctgggcacctcctccatggctctcaggggcctttcatttctgtgggaggggcagagaggtaggtggcacagaagatggggctttatgcttgtaaatattgatagcactggcttcctccaaagtcccaatactctagccccgctctcttcccctctttctgtcccccattttccagggggtatatggtcagggctccccaacctgagttgggttacttcaagggcagccagcaggcctggatggaggcctagaaagcccttgccttccttcctcccacttctttctccaggcctggttaactcttccgttgtcagcttctcccccttcagcctgtttctgcagcagccagggttctcccccctacaccctctgcaggtggagagagagaagctgggcccagccgggccgtgcctgctggcacagacgccttaacgctgtgtgtatgactgtgtgactgtgtgggagcctggactgacagataggccaagggctactctctggcatctccaggtgttttgtagcaaacagccacttagtgctttgtcctggactccactcagcctcaggatggggaatagccaagaatggcagcctcagcgcagaggcaaggtcagaaagagacggcgcttcagagtttcctttccagacacccctccccgcactgtgaagttcccctgaccgccctcctggttcacaaagagcattaagaaagctgcggtggtctgagcaacatagcccaaagggctgagcctcctggcctgcctgcccgcccaccctgggagtcccagtggtgaggctcagagaactgctaaggggaaagaacagctggagtttctgttgatgtgaagaaggcagctcttggcctcccactcccacacttctttgcctataaatcttcctagcagcaatttgagctacctgaggaggaggcagggcagaaagggcgagggcctgcctctgacctgccgtgtcctttgcaggaaggaggtaggcacctttctgagcttattctattccccacccacacccccaggcagggttggaaatgaaggacttttttaacctttgttttgttttttaaaaataaatctgtaaaatctg

SEQ ID NO: 869 - DNA, 40129 bp, Homo sapiens
acttgaggccaggagttcaagaccagcctggccaacatggtgaatccccatctctactaaaaaaattaactggacatggtggtggacacttgtaatcccagctactcaggaggctgacacatgagaattgcttgaacccgggaggcggaggttacagtgagccgagatagcaccactgcactccaacctgggcacagagtaaggctctgtctttaaaaaaaaaaaaaaaaaaaaagttttgtcaaaacttagcagagcaaggctaagaaagctcaggaacctggggcctcggcgatgcctgtagtggcaacttatgtataggggctgcagggagaggttaggctgtggcattgagccctgatagcccctatcatcaggaagtggtagatttcagttaatcctgagttctggaaaaataaaaaaaaaaggaccatctgactggtttcctctgcgccctgaatacccctaagccaacacgtgctgaggctcaagagcattggtacaaagtgcatggggatttgattagctaccttcccacctgccctgtgggctgcttgcgtccctctcccttgtcctcccccagggagatggagaaaggccctagctgagaccctcacttactggtggcttgaggcttgaactgctcccggctgtaggccccattggcttgacacatgttggcaggccggaggtggggacgggctgcgaggatgggaggcaggtagatgggcgaggctatttgcttggaaggtaagactctctggctggatgttgggctgcactgtaggggcaaagcatctcctcctggggaacgaagagttggggtgggaggacccacatggctttttttttttttttttttttttttgagtctgagtcttgctctgtcactcaggctggagtgcagcggcgcgatctcggcttactgcaacctctgcctcttaggttcaagcgattctcctgcctcagtctcccaagtaactgggattacaggcatgcgccaccatgcttggctaatttttgtatttttagtagagacaggccatgttggccaggctggtcttggactcctgacctcaagtgatccacccacctcggcctcccaaagtgctaggattataggcatgagctattgcacctggccactttttaaaaataaaagttggccgggcatggtggctcatgcctgtaatcccagcactttgggaggccgagatgggtaatcacttgaggtcaggaattcgagaccaccctggctaacacggtgtaaccctgtctgtactaaaaatacaaaaaattagctgggcgtggtggcgggtgcctatagtccctactgctcgggaggctgaggccggagaatggcatgaacctgggaggtgggacttgcagtgagctgagattgcaccactgcactccagcctgggcgacagagcgagacttcgtctcaaaaaaaaattaatagaataaaaataaaggtaatacctacctgttaaaagaagtcaaaaggccaggtgcagtggctcacgcctgtaatcccaacactttgggaggctgaggtgggcagatcactggaggtcaggagtttgagaccagcctggccaacatggtgaaaccccatgtctaaagaaaaacaaaaaaaattagccaggcattatgacgggtgcctgtaatcctagctacttgggaggctgaggcgggagaatcacttgaacccaggaggtggaggttgcagtaagccaagattgcaccactgcattccagcctgggtgactgagcaagactgtctcaaaaaaacccccaaaaaacaaaaattagctgggcgtggtgatgcaggcctgtaatcctagctactgggaaggctgaggcaggagaatctcttgaacccaggaggtggaggttgcagtgagctgagattgagccactgcactccagcctgggcaacagagtgagactctgtctcaaaaaacaaaacaaaatgaaacaaaacaaaacaagtcaaacagtacaaggagtcttctcttcttccttccagtcccacccctctataatgaatgagtgataatggtaacagtttggtggtctccttcctttttgatgcttatacaaacatgttcaaagatatatgtgcatataagattctttcaaacactggatcgtactgtaatatattaaaataacagactcttttcacttaacattttttcatggacatctgtccagatcaatccatttatatataacttattttttatagctatatactagtatccttagaatggatacattatttattcagctcacctccttgtttcagaaatttaggttatttctaggtttgttttttactacttcaaacaatgctgcaataaacattcttgtacatcaaatctttgtaccgatgctttaatttctatggatgggttcctaaaactttctgtgtggtgcatggacaagcagggacagtttggatgacagcaggtacctatccctcctgctgtccatccccccgcttggccatccctggggcttctcccccaggcgatccaagtgtgtcacctgtctggtcagttgaccccacctctcaactgccataaagcccagcttagagcaggtcccatccattgtttttttttttttttttgagacagagtctccctctgttgcccaggctggagtgcagtggcatgatcttggctctctgcaacctacacctcctgggtacaagcgattcttgtgcctcagtctcctgagtagctgggattatggtgtgtgccaccacgcctggctaattttttttttttttttttttttttgagacagagttttgttcttgtcacccaggctagagtgcaatggtgtgatctcagctcactgcaacctccgcctcctgggttcaagctattctcccgcttcagcttcccaagtagctgggactacaggcccgggtcaccacacctggctaatttttgtatttttagtaggggtggagtttcaccatgttggccagggtggtcttgaactcctgactttgggtgatctgcctgtctcggcctctgaatgtgctgggattacaggcgtgagccaccgcacctggctcatccactgttttgatctgggtgcctgtctaccttttctgcccatccagcctctacaaggtcaattccccaggagcgagcggtcagaagtattaatttttttggtcacacacccaaaaattttgctgtagagagaggtttcactgtgttgcccaggctggccttgaactcctgggctcatgtgattctcctgcctcagcttcctgagtagctgggactacaggtacaccccagtatgtatgtgttttgccaggctggtcttgaactcttgggctcaagcaatcctcctgccttagcctcccaaagtgataggattataggtataagccaccacagctgacctgtttttttttattttttattttttgtttttgagacgatgtcttgctctgtcacccacactggagtgcagtggtatggtctcggctcgctgcaccctctgcctgctgggttcaagtgattttcctgcctcagcctcctgagtagctggtattacaggcatccgccatcatgcccagctaatttttgtattggcatagagacagggttttaccatgttggccaggctggtcttgaactcttgacctcaggtgatctgcccgcctcagcctcccaaagtgctgggattacaggtgtgagctcccacacccggcctgacctgtttttattttaatttaattttattttattttaattattttgagattaggctccactcggtcgcccaggctggagtgcagtggtgcaatcacagctcattgcagccttgacctcccagggtcaagtgatcctcccacctcaacctcctgagtagctgggactacaggttggcaccaccacacctggctaattttaaaaaattttgggggctgggtgcagtggctcacgcctggaatcccagcactttgggaggccgaggcgggcagatcacgaggtcaggagttcgagaccagcctggccaacatggtgaaacccagtctctactaaaaatacaaaaattaagccgggcatggtggcgcacgcctgtaatcctagctagtcaggatgctgaggcaggagaattgcctgaacccaggaggcggaggttgtagtgagccgagatcatgccactgcactccagcctgggcgacagagagagagactcatctcaaaacaaaacaaaacaaaaaagttggccaggcgtggtggctcactcctgtagtcccagcactttgggaggccgaggtgggcggatcatgaggtcaggagatcgagaccatcctggctaacacgatgaaacgccgtctctactaaaaatacaaaaaattagccaggcgtggtggtgggcacctatagtctcagctacttgggaggctgaggcaggagaatggcatgaacccgggaggcagaagttgcagtgagccgagattgcgccactgcactccagcctgggcgacagagtgagactctgtctcaaaaaaaaaaaaggttttgtggagatgaggtcttgtggcttgtggcgttgcccgggctggtcttgaactcctgggcttaagccatcctcccacctcagcctcccagtgttggaattacaggcatgagccacgtgcccggctgtctttgttttttttatatgaggtcctctctcccttaacatggagaagcattaaaagtgtggccccagatccctctgtccaggaagcctctgtggactgccccttacttttcatgatgtccatgatgtggcgctgctggatgttcgtcagtttggattccttcatcatcactgcacgacaaagcattctatgaggcctcttgggctgcaggcggatgccttcacctgacaccctactgaaatttaaaaccctacatcctagccccattctgcactgagcatgccttctctatctttcctgcttcgttttttctatagcacttacgaccacctaaaattctatatattttattttattgttatccttctatattagctgtatgataagaatttttgctggtttaataaaatttctgccctctgttaaatattttttcctctttctcttttttttttttttttttgagatggagcttccatcttgttgcccaggctggagtgcagtggcgcgacctcagctcactgcaatctccacctcctgggttcaaggaattctcctgcctcagcctcccaagtagctgggattacagacatgcgccaccacgcccggctaattttgtacttttagtagagactgggtttctccatgttggtcaggctggtcgtgaactcctaacctcaggtgatctgcccaccttggcctcccaaagtgctgggattaccggtttgagccacctcattttctttcactgctgtatccccagcacctaaaacagagtctaaggcacatggtagacttaaaaatgttgttgttggaaaaaaacaaaaaagttgttgagtaaaagaacacatgaatacttgttcatcatgtttcaggggctggagctacaattgtgggccgaaacaggcacggttcctgcctgatgaaattcatgatctggagggatagatgggacaccaaataactgactacagcttgtgctaagcccagtgaaggaaaatgtgtgagggcacataacagttgatcctactgtggtggtgaggagcagaagtcttcctcgggaaagttgaaagtgtgatctaaaggatgcataggagttaactactctaaaaattttagttctttgacttttggcaaggtgtagcaccttgaaccttcccctcccccccgccccgccccgcccccgactaaggcatatgcagtagaattttgaagctttctgaaccccaggctccttatctgtaaaggaaaatagtgctaagccacaggtcaggtacgggggaactgagttacagagggtaactaccaccattcttctctcatcctttaactcaggggtccccaaccctccgtccgtggactggtaccagtccctggcctgttaggaaccgggccgcacagcaggaggtgagcggcaggctagcgagcctcaccgcctcctttcaggtcagtgacggccttagattctcataggagcgcgaaccctattgtgaactgcgcacgcgagggatctaggttgcacgctccttatgagaatctaactaatacctgatgatctgaggtggaacagtttcatcccgaaaccattccccacacctccgtcagtggaaaaattgtcttccacgaaaccggtccctggtgccaaaaaggctgggatcgctgctttaacggactgacctctgagcagctcgcaggtccccggggtgtaagtgatggtcttggggcggcgccggaacccagttcctttggtcactacctccatctgcttctgtgaagccatgggaggactctgaggagggaaagacgcaatgacacaccccctgtctcctgtccctaatctctgttccccgacgcccaacacccccagaagtctggaagcggggatcgagccagagaatgatgccgccagttaatattgcgacagtgcccaaacctcccatccagacacacagatacacacacacagtcctcattctgacccagcgcctgtggcagggaagtctcctcgggagggagtgttaacacagccatggtcacaacagtacccactgagtgatatgccaaaattgaaatttcaccctaagaccctctctgggtgctcccctctccacatagaagtgggctcccggaggcggtgaccactgctttacagccgcatccgcaccggtgccacgcagaaatactgcgcgatctgggctgctggagctggcagctagcgcctctcgctactatagaaacgcgcacacaccagtcagcgcatgcgcactttccccgctctgtcctgcctcccggaagtgatttcctctgggttacggcgcaggcgcaagataagctaggagccgcgcgagtcgtagtgtcgctgtttgcgggtctccgcgcgggaccggggcgcagcggggtcgctgaggcgagggtgtcatgtcagacaacgaggacaagtgagtgcgggagcggagtggcctttgcggcaaccttggaaggggcggatgaggcaaggcttgggtcggctgaggagcctggcgtctaggggcaatgtctgaggggactggggtcctgagggggccggcggagccgaggaagggaagggcgggcgacccaggagcacagccccggctggaggcacaggagggcccaggctcgagggtccagaggggatccgtagaaaaggtgtccttcagcaaatgttccagcgagccgggctctgtatcatgcagtgggaatattgaggtgaatgaacaatcgtccctgcctctccacgtgctcactttctagaaaaggggtcacaggcccataagtaagcaagcaagcaggtaacggtggtcgcgtgagcttccccagttctagacgtatgtagtataggagtactccagaggagggtctggggcagctccaccgggtggcattaaataaaagtctgggacggtcctttgcagtaatttttttttttttttgaaacagagtcttgctctgtcgcccaggctggagtgcagtggcgcgatctcggctcactgcagcctccacctccggggttcaagggattctcctgcctcagcctcccgactagctgggattatgggcgtgcaccaccacgccttgctaattgcttgtagttttagtagagacgggtttcaccatgttggccagactggcctcgaactcctgagcttgtgatccacccgcctcggcctcccaaagtgctgggatcacaggcgtgagccaccgtgcccggcctgcttgtagtaatctagatgagagaagtcagtagcttatagtagggtggtaggagtagaggtggtgagaactggttttgaattctggatatattactattttaaagatagagcccaaaaattacctgtgggatatgtgggtgcaaagagagctagtctgaagataaaaataagaaacgtgtgggattgctaccccattcccagtgagtgtcagtagagaagaggagatgacccgtggctgagcattagggcatttggacattgagtgcttgggggaaaagagaagccggggaggtgggggaacaccaagagggtgaggtgtccttggagtcaagtgaggagagcaagtggcctaatgtgccagctgatagatcaggctaaatgagaaggagagttggccattggatttagcaacgtggagatcattaatgagcttggaaagtggttttgatggagctgttggggtgaaaggctttttggagtgagattatgacaaaatgggaagagaggaagatagtgagggtggacagctctttcacacatttttgcttcaaaggacaccatggaattagggctatagggggagagagaagagaaataagggtttttttttttttttttttagatgaggaaaagcacatgttgaaatgctgatggggccgggtgctgtggcttacacctctaatcccagcactttgggaggccgaggagggtggatcacctgaggccaggagttcgagaccagcctggtcaacatggtgaaaccccatctttactaaaaatacaaaaattagctgggcatggtggcgtgtgcctataatcccagctactcgggaggctgagacaggagaattgcttgaacccaggaggcagaggttgcagtgagccaagatcacgccattgcactccatcctggacaacagagcgagactttgtctcaaaaaaaaaaaaaaatgctgatgggaatgatccagtagagagggaaacagtgatgatgaatgagtactagcaatatttgggggcagatggggaaaaattgaaggggtaaaatggaacaaaagtcggatttacttcttcttcttattattattttttattttttgagaaggagtctcgctgtgtcacccaggctggagtgcagtggggtgaccgtggctcagtgcaccctccgcctctcgggttcaagcaattcttgtgcctcagcctcctgagtagctgggattacaggcgcccaccaccacacccggctaatttttttgtatttttagcagagacgagatttctccatgttggccaggctggtcttggactcctgacctcaagtgatgcacccacctcggcctctcaaagtgctgggattacagacgtgagccactgcacccagctgatttacttattaagtaaatatttattgagtgcttcctacatactgggcgagacacagatctctgccctctttgattttttttttgtttgttttttgttttgcggtggtgggggggggttttgagacggagtttcactcttgttgcccaggctggagtgcaatggcgtgatctcagctcaccacaacctccgcctcctgggttcaagtgattctcctgcctcagcctcccaagtagttgggattacaggcatgtgccaccaccactcccggctaattttgtatttttagtagagacggggtttcatcatgttggtcaggctggccttgaactccacccgccttggcctcccaaagtgctgggattacaggcttaatcccagagccacaatacaaagccaccatgcccggcctctgaattttttttttttttaatttttcttatttattttgagacaggttcttgttctgtcacccatgctggagtacagcggtgcaatcttggctcactgcaacctccacctcctgggttcaagcaattcttgtgactcagccccccaagtagctggtattacagacatgtgccaccatgcccggctaatttttgtatttttagtagagatggggttttgccttgttggccaggctggtcttgaattcctggcctcaagtgatccgcccacttcaatctccgaaagtaccaggattacaagtgtgatccaccgtgcctggcccctctttgattcttttaagtgatgctctaagtaactgatctcttcttcctgtacagttttgatggcgacgactttgatgatgtggaggaggatgaagggctagatgacttggagaatgccgaagaggtcagtattcagcctcaggctcccacctctgcagcccaagctgccaaatcgtctgacaggtgatgattagctgaatgtgtctgccttctatttgtggtcaaggcccctgccataagcattcccagttagagtgagctgtgttccagtcttgcatagcagaacagccctgcagggtgggcctgaaagcttttgtccatgtggtccacagcctgtggcttctggggcagttagttcactgacaagttaaacggtgccttccttcatttggcaaacatgtgttgaatgtttattatatgccaggtgctttctgctgggtgggactgcttaaggagcaaagggaagaggtaagcagggctcagatgaggcagtattttgtagcctaaaggcaatgggaagctactgacaaactttgagccagggcacagtccaggttacattttagaaagtacattcctgcctcgagtaaggagtgaactggggaagggcaagagtgaaaggtgagaggcctgtggcttggacataggtgctggtagtgcaggtgatgagaaggcagataaaagagttatttcggtgggttggttatggggctgagaaagtgagtggtgacgaggacgactctcaggtttctggcttgagcaactaggtggataggttgccagcctcaagaggaaagtagggctttctgtcttgtgtgactgatgagggaaaaaatgcagttatgttctggagagacatggagccttctctctctctgcatggcactttcagataccttttcacttgagtcagatgcgtccttctccatccttctggtccccttcccatccctgtcatgtagattgtgcctcctagatgtacttcagccctgtctgcatttttctactcctggtgccttaacctggcttagatcttattgcttttcagccacattcctgcaggaattgtgtggctggttttcctgcttcagtctcactccagactctgctctgtgtgctcttctcctttcagcaccctttcttacttgcccacatgctcagttactactggctttcctaaatggcctctctgcttctgccactgccgcctgcagaatattcgcaacagagtatccagagtgatcctttctttctgttttttgttgttgttgttgttgtttgtttgcttgttttaaattaagaagtggtgtcttgctacgttgtctaggctagagtacaatggctattttcaggtgtggtcatagcgcactacagccttgaactcctgggctcaagtgatccttccagttcagcctcctgagtagctgggactgcaggttctgcaccaccatgcccagctcagagtcaactttttttttttttttttttgagacggggtcttgctctgtcgcccaggctggagcgcagtggggcgatgttgactcactgcaagctctgcttcccgggttcatgccattctcctgcctcagccttctgagtagctgtgactacaggcgcccaccaccacgcccggctaattttttttttttttgtagttttagtagtgacggggttcaccgtgttagccaggatggtctcgatctcctgccttgtgatccgcccgcctcggcctcccaaagtgctgggattacaggtgtgagccactgtgcctggcctgtttacttaattctttatataccacagaatttattctcttgcctacaatcctctacgcaccttttgttctaattattgtccacaactagttgtccaaacctctttctcctctatgcctttgcatgttgcctccttcctcattggtttgacagctcctgctcatccttctaggtgagctcaagtctcatccctggagttttcctaacccccagtgtgagtgaggtgtccccacctcctcgggaactctgttgcacccttcatagcacctgctctgtttactcttgtctcccctttagaccattaattgagagcagaaattcctagctttctttctcagcatctgttaacaatatctggctcaggacaaatgcttagtaagtaattgttaaatattcctgccttcaccttgacttttctagccacttggcccattggctcagctcccctatctgaaagatgggaagactattcctagcttcctgcttagggtaatttttttgtgccaggacctcttttacaggaccaacattctgataccaccccatctccaggccctctgctctcttctggatgaggcagttagctctggaatctcagacctccattaccaggtctgaggcttggtcaggttagctgactttccaagcctctgaaatgagaactgtaatccctgcctcataaggttattgtaaggattacatgagttgttaggaagcagttatgtggtcccctggcatgcagtaagcattaacggtggctgtagcgagaattgtgattgttgtcattatcactctccctgtaacccaaaagtgccacctgagtctttccctcttttttgtcttggtgtccaggaaggccaggagaatgtcgagatcctcccctctggggagcgaccgcaggccaaccagaagcgaatcaccacaccatacatgaccaagtacgagcgagcccgcgtgctgggcacccgagcgctccagattgcgtgagtgattgccccttcactgtcttctccatctgtcaggccacagtaagctcttgtaccgctgatctttcccagcctggcacctgaaaacagactctctgctctcacattccaaaagtggtgccgtccctgcgtaccaggcattgagctagtcccctgccctcagggagcttgtgatctaataggagaactaggacatgaacatctgagaagtcaagtaacaatatgggagaaaaacgataaaaaaaaaaaacagaactagatggttgcgtgtcagattagtgcagcaaaaaaggtgaattcagagccaatgtgtaccagtgtagttttttttttttttttttgagatagagtctcgctgagtcacctaggctggagtgcaatggcacaatctcagctcactgcaacctctgcctcccaggttcaagtgattctcgtgcctcagcctcccaggtagctggaattacaggcatgtgccaccatgcctaactaattgtgtttttaatagagacggggtctcgccatgttgcctaggctggtctcgaacgcctagcttcaagtgatccacctgcctctgcctcccaaagtgttgggattgcaggtgagagccaccgcgcccggccatggtggttctttgttgttttattttccgagtcaagatctcaatctgttgcccatgctggagcacaggggcctgatcatggcccattgcagcctcaaactcctgggctcaagcaattttcttttctttttttttttttttgacagagtcttgctctgtctcccatgctggagtgcactggcccaatctcagctcagtacaacccctgcctcccgggttcaagcgattgtcctgcctcagcctcccgcgtagctgggactacaggcgtccaccaccacacctggctaatttttgtattttttcttttttctttgagatggagtctcgctctatcacccagcctggagtgcagtggcgcgttctccgctcactgcaagtgctgcctcctggcttcacgcccttctcctgcctcagcctccagagtagctgggactacaggcgcccgccaccgtgcccagctagctttttgtatttttagtggagacggggtttcaccatgttagccagggtggttggtctctttctcctgacctcatgatccgcccgcctcggcctcccaaagtgttgggattacagacgtgagccaccgtgcccggctatttttgtatttttagtagagacggggtttcaccatattggccaggctggtctcaaactcctgaccttgtgatccacccgccttggcctcccaaaatgttgggattacaggcgtgagccaccgtgcccggccggtgcaattttcttttttcttttttttttttttttgagatggagtctcgctctgtcgcccaagctggagtgccgtggcgtgatctcggttcactgcaatatccacctcctaggatcacgccattctcctgcctcagcctcccaagcagctgggactacaggtgcccaccacaacgcctggctaatttttttgtatttttagtggagatggggtttcacggtgttagtcaggatggtctccatctcctgaccttgtgatccacctgccttggcctcccaaagtactgggattacaggcatgagccaccgcgcctggccggctcaagcaattttcttgtctcaacctcccaagtagcttcaagctgggattacaggtatgtgccactatgcctggctttgtattttttgtggagataggggtcttgctatgttgcccaggctggtcttgaactcagcctcaagtgattctcctgcctcagctcccaaagtgctggagctgggattacaagcatgagcaaccattcctggctttaaggtggttcttgatgtgaggtagactatggccagtccagcagagtggggggccctccagcttgaaagcacgctagagagatgaaagcacagagcagtggtggggttttggggatttgaaaatcagcaaacttccctcctctcccacatttgggagaataaagattcaggagatagagtagacaggtggagatgcgagtgtccaatgagtgcagatgtgttagccataggcagtgcaggccttcagatgcctgctaaggtttggggcagactggagaacagactggaagcaccctctgccaacagatggctttgagaaagcagggactttcaaagaggctgggccacagatgcctgctttttttccccccaggctcacctgtcagaatagttcctcctcctttcttttgaggagtaggtgaggggacagagcggggtactctaatggtactgtggggaagcatgagggaagcatgagactgagaacaggagcccctaccccaaactccctatagactgatgtgggaaatggtgggtatctggaggagcgggggtagttcaagtagggaataatggaaattagcctagaaagaaaagcagctgggtgccgtggctcacaactgtaatcccagcactttgggaggacgaggcaggtggattgcttgagcccagaagttcaaaatcagcctgggcaacatggtgaaaccccatctctacaaaaaatacaaaaattagctgagtgtggtggcgtgcgcctgtagtcccagctactcgggaggctgacgtgggaggatcacctaaggccaggaggttgaggctgcagtgaactgtgatcgcactactgcacaccagcctgagtgacagagactccatctcaaaacaaacaaacaaacaaacaaaaaaaaaacaaaggaaagctggggccagatttgtggactctgtgtgcttacaggggcagcaaatgctgtctgtacattctcctccttagtgttcaagcagcactgggctgttgcctcctctagtcctgtaggggtaaagatgaccatcatgtctacttcaataaagggttttatgggtggacaacattgttctcccccattcctcagtagcggacctcttctcagcctggttgcactccttgctcttatgcatggcattagagccacacccagtgtgacagccatacccaatatgccaccaacgtcaggatcctctgggcctgcaccatcaactatggtagccatgaactgtatgtgtccatttacattaagtacaattaaataaaattagaaattcagtttctttctcactagccagccacacttctttttcttttatttatttatttaattttttttgagacggagtcttgctctgtcacccaggctggagtgcagtggcacagtcttggctcactgcaagctctgcctcacgggttcacgccattctcctgcctcagccttcccagtagctgggaccacaggcacctgccaccaagcccggctaattttttgtagttttagtagagatggtgtttcaccgtgttagcgaggatggtctcgatctcctgaccttgtgatctgcctgcctcggcctcccaaagtgctgggattacaggcgtgagccactgcgcccagcctatttatttttttttgagaaggagtctcactctgtcacccaggctggagtgcagtggtgtgatcttggctcactgcatcctccgcctcccgggttcaagtgattctccaacctgagcttcccgggtagctgggattacaggcacccgccaccacgcctggctaatttttgtatttttagtagggacggggtttcaccatgttcgttggccaggctggtcttgaactcctgatctcaggtgatcctcctgcctcagactcccaaagtactgggattacaggcatgagccaccacgcccagccttttcttttatttttttagagacagtttggctctatcacccgggctggagtgcagtggtgctatcatagctcactgcagcctcaaaacttctaggcttaagtgatcttcccacttcagcctcccaggtagctaggactacaggctaatgccaccacacgtggctaatgtcttaattttttgtagagacagggtctcacaaaaagactcctggcttccagtgatccccctgcttcagcctccaaagtgctgggattacaactagccacatttcaagtgtgttcagtagccacatgtggctactggttaccataaaggatagcacagggggataggacatttctgtcattgcagagcattctatggggcaccctaatataggctaaaagtggcccagtagaaagaagaattcataagttatttttaaaacaaatagactgcttatttgcaagttaaacagtctttcagcactgaagaaagatactgcattagcacttgataggatgctgagatgattaaagatgtagtcccagccgggcgcggtggctcacgcctggaatccgagcactgtgggaggccaaggtgggcggatcacctgaggtcaggagttcgagagcagcctggccaacatggtgaaaccccgtctctactaaaaatacaaaaattagccgggtgtggtggcgcgcgcctataatcccagctactcgggaggctgaggcaagagaatcgcttgaacctgggaggcggaggttgcagtgagccaagatcgtgccactaatccagcctgggtgacagagtgagactctgttaccaaaaataattaaaaaaaaaaaaaaagacataatccccagtcctccaggtgttttctggtgggggagatagacctgtgcacaggtacccacaacccaaggcagatgcgagtggtgctttatgaaaggtacaaagagagttattgcagaggtgactgggaaagccttgtgaagggattagaattctagtggggacaggtaaagagagttggttttgtgggtactccaggtgccagaaacagcccaaggaaaggtccaggtggaggcaggcagttgtggatttgtgatgagggatcataagcagcttggggcataaggctggagaagatgacactggtcctgtgagtgacaggttcagaagattagagttcatttggtgggcagtgtgcagcacttaaaggttttgaggccaacatccagcatccaggccactcataaatccaagtgtcctgtttttcttttctttctttctttctttttttttttttttttgagatggagttttgctcttgttgcccaggctggagtgcaatggcatgatcttggctgattgcaacctctgcctcctgggttcaaggaattctccagcctcagcctcctgagtagctgggattacaggcacacgccaccatgcctggctaatattttgtatttttagtagagacggtgtttcaccatgttggtcgggctggtcttgaactcgtgacctcaggtgattcacctgccttggcctcccgaagtgctgggattacaggcgtgagccactgtgcccagccaagtgtcctgtttttcttggggagcaaagcttgatccagctcattccagtctttagtgctctttccacttaagggctatgacaccatctggtggctccttgcctgctgtaagctcttgtacagccataatgggactctgcacttggtaggtgcaggtggagtctcactctgtcacctaggctggagtgcagtggtgccatctcggctcactgcaaccttcacctcctggttcaagcgattctcgtgcctcagcctctcgagtatctgggactacaggcatgtgccaccacggccggctaattttttgtatttttagtagagacggggtttcaccatgttggccaggctggtctcaaactcctgacctcaggtgattcacctgtctcagcctcccaaagtgctgtgattacaggcgtgagccactgcacctggccagaacaactgtttgttgggtaggttttggatggggtttcagtctggttcattagcaccacctggtggctgatgatgtttgtcacatctacttcttaactggatggttgatgtgtttctctgtagaagccatggtgcaagaaaaattaaattacttaaggacacattcttgcacattccatgtgcataataggtgcggaatgagtgaatgcccttgaattatttatattttgaaagaaagcaggcatatgcagatcaggtattttgccacattctttaaagctttatattttgggaaagtttaaatacttattaagagaggatatagggaaagttaaatacttcatctctgcccttgggaaattttcaggcttttgggagtaatataaatcgaaatatttagtaataaaattagtaagctggtagctctcagactagctgattatcagaatcatctgggcagttttgcaaatgcaggctctcaggccgcttcactagagattctattccgggggtctggggaaggacccaggaacctgtattttttagcatgctctcctgttaattctggatttgttggtgtgaacctgagctggaatcatcaggggtggcttcctagaggagatgggcctagaattggcatccctttgcttggtggtagagtccccactgtgggccaagtgttatgctgggggctgggcctccgtggtgaatcacatgtggttctgggccactaggagctcatggtctaatgtggaaagtttccaaacaagtagttacagttcaatgagattggtgccaagaaaagtatatgcaaaatgagtccaggtactgaagagtcagcacacgatttccagggtggagacatctgaacctctcgcaggtttttagggagaggaagagcttgtaagagcacacaaaagggaaacaacatggcgcatctagggaaccagaaatagtttggtatggctggaatgtggagtaaatacaggaaagtagcacgggactgtgctaggaaggcaaacagggaccagactgcactctggcctgatagccaaggggagtcatgacagtgttgtaagcaggtgagccccctgactgctggcctcaggtgaagggtggggagggctgggcaggaagggcagggcctctactgaggtgttgtgtctatagagaatggaaatgatgccgggcatggtggctcatgcctttcatcccagcaatctggaaggctgaggcaggcggattgcttgagcccaggagttcgagaccagcctgggcaacatggcgaaatgttaatttcacccatctatacaaaaaataaaaaaattagcatagctggtggtgtatgcctgtagtcccaagcaggagaattgcttgagcctgggaggtggaggttgcagtgagccacgatctccccattgcactccagtctgggcaatgggagtgaaaccttgtctccaaaaagtagagagagaaaatagaaattgaaatgaggtgcactgggcactgaggcaaggctctggggttggagcagttagaatggtgtgcctttgcacatgtctccctttccaccaggacattctgctgtggccgctggactccggagtctgtgataggcctctgccagggaagatctctggcagtgcccctacacaccactccctactgtgcctgcctacctagaagatgacgtttctaggtggggaccaggatgccgttccaccctcactgcctgttgggcccttctccctgggtttgtagtctccctaacacctgtccctatccctacaggatgtgtgcccctgtgatggtggagctggagggggagacagatcctctgctcattgccatgaaggaactcaagtaagtcactcaaatcatggttcacttctccaaatctctgggaggcatctgttgggctctctgttgcaccctttgctcccacttgcctggctggagaagttgatgcttattcctacagatccttaggaacagctcaccaggaagtaggaggaagagagaagaggaggcagggaaagtgggagggcactgatgagacatggacgtcttctggctgttggaatttccctgttcctgctgcaggaggccttaccaatattctgtcattcttccccctcttgtctgatataaaaactttctttttcttgtaattgctttcttacaaagtacactcatcagccccaagaggctgctcctaagacttctctttgcttgtgttttgcacacaatctgttccttctgcggcagagctggggtcaccagccctcatgtacttgtgacttctcccctgccacagggcccgaaagatccccatcatcattcgccgttacctgccagatgggagctatgaagactggggggtggacgagctcatcatcaccgactgagctggagtcatcttcctgcccttgccccatgcccaattttcattctcactttatatgtgtaaataataaaatattcaactttccaacccccttcccctctgcttatctgcaatgtcaccacctgttgcttccccgttaccgccatgctgcgtggagcatgcacctattccagtggccctgtgactgtcagctccttaagaagcaccaggggcccttagcccctttggatcccccacatccttccctccatctccctgttccccagagcaaaggctgctgcaggggagacacctcagctgccttccaagcagacagacaagtctttgtgcccagggagctggttgccacggaaacccccaatttcctttccagtggggactggctgcaggggcttctcccttctcaggagtatcacagagcaggtctcatcaagccacccattgtttcctaaggacctgcttcgagcctcttatcgtgggctcggatcccctttcaggagcagtgccccagcaggaagcgtgggggtgtgctgatctcccaccctccccaggcagagccctgctgggcaagtcagcagctggagcaaggaccgagcacctgcctacccctgcccccatggctctgtccccactcctcctcaggactctgcccacacgctgtcctctgtggcccacctctttggtgtgccacacccatgccttcttcctagcctctataagatatcctttccctcctatttggggctggtgatcccctgaggccttggggacatggtgctggggtggtggtgctcctgggttccaggtgttacattaagtcagagctggagctcccccttcctctgcctgaggttctaatgggtcctcttcctttctccaccctgcttacccaacctgaggtaagaccagtcacactggctcctccctcctagagggggtcagggggagggtgtatattgacatgaacagggatagagggtaaactggctccctgaatatgccagccttaacctccattccactgccagctccccttcaaagaggaggagctgggcttccctaacctctgcaggaggcagggcctccaggcctaggtgcagcctggccctgggatgggatgtggggagtgaatggtgaggatctgcattggtgggaggggtgtccgctgccctggagaagggttaattcagggagcagtggacttcacacccccatccaccctcctccaagcctgtggaatcctttaatcaagttgggtgctgaaatttcagctctgaaatgccgcctttgtgctggcatccaggcagccgccccagagtgcgggggtcactttctcggccccatttctctaaatggtctctttgttccctgctgggctgctcagtatcagatgtgattaaagggagatggggtttgggctggggaggaggggaattgggggttaacccttaggggatagagtgcaagggaaatgggacagaaggggtgtttttcctcctgtcttcctcttcccattctcctcttttggggagtcccctgctattcagctgtctgggcctggcttttgacttctcttgaataaaatgtcccggtcaccactattggttctgttttcttagggtttgggcatagtctcttgagtcatttccagaaacacctgacccttttttaacaagtggagctcctgccttcctgaggcctgtgcacacttggaacctttggtctaagggatgcacacaacccaggtcttctgacttccttggggtcatttcccctccttccacatcctcagtgatttcccactcactctcatgagatgtggggtcttggaggtgatagtgtcatcttccggatgtgccccctgctccccactgtgccagctccatatccctcatcccacggcgagcaggagtagtgaacagaccacaaatggacaaaagtcctgcctttcaatgaaggggaaagggtgggttgtaaagattataaacacataaggttagtactgattgatccatgacaaaattctagaataggtccctccatgtttaaaagtgcttatataataaagaggagatcgggcactagcatagggtgtctaagaaccaatattgccaaataagtttttttttcgatggttactggtccagtaggttgagagaatgccagagatcagtgaatcttgattttgacaaggcatcagtagtctccatgccactgtgacagagaagtgtgtgcttcatggtgatgtaattagacagttttagaactgattagacagcctcaagagtggagataatagctgggcgtggtggctcacacctgtaatcccagcactttgggaggctgaggttggcagatcacgaggtcaggagatcaagaccatcctggctaacacagtgaaaccccgtctgtactaaaaaatacaaaaaattagccaggtgtggtggcgggcgcctgtaatcccagctactcgggaggctgaggcgggagaatggcgtgaacccgggaggcggagcttgcagtgagccgagatcccgctactgcactccagcctgggcgacagagagagactccgtctcaaaaaaaaaaaaaagagtggagataataggccaggtgcggtggcttacgcctgtaatcccagcactttaggaggccgaggcaagcggatcatgaggtcaggagattgagaccatcctagacaacatggtgaaaccctgtctctacttaaaaaaaaaaaaaaaaaaattagctgggcgtggtggtgcacacctgtagtcccagctactcgggaggctgaggcaggggaagcacttgaacccaggagacagaagttgcagggagccaagattgcaacattgcactccagcctggcaacagagcaagactccatctaaaaaaaaaaaaaaaaaaaaaaaaaagagtggagataataggactgacagtggagagaggcgtttaatgctgtacacaggtgtccctcttcatttcgacctttattagtgacttgaatgaggctattcaagtttgcagatacataaagctctaaaggagagctaagttctaaaaagtttaatacaggtggggaaatgggtcaaacccaacaaggtgagatctgttaaagatcagtgtaaagtcctgcttttatctaaaacaaaacaaaaacagcatacatacaatttggatatgactttgcaatggatattgtctaaaagatcggggtttcggttaccatccagcttcacgggaaccagcagttttggggaggttgcttgaagagcttccatgatgcaggtcctagatggagggattttggccaccctggggactgggctacttcttggtgccctgcctctcccctggtcctgactaggggctggagaccgcagatggaaggaagggagctgaggatgcccagtctggagcagtggaagatgcattgctccagatacaaagcagaagcaggggctgcaaaccacaggcaggtggaggggatgatggttaaaaatgcaagccttggagtcagagctgggttcagattctggcaccagcacttcttagcatcagcctcgcaaacttcagtttccccatctggaaaattgagataacgatcggacctaccccttcactggcctgaatgacataaaacccttggtggagcacttagtaaatggcagctggatataagctgttatgagctgggtatgaggaagaacttccaaccatcggagttgttcatcagtggagcaagatggcaaagagtctttggagttgtgtgcttgtgaggtggagtggtcctggcctctgggtgcagtttggacttctgctgaggaaagagctcttagggagtaggcgcttaaggagtagactgtctgacatccttggtctggacttggacatgggcacctgctgtgaaggcttggctagatcctggcgtgggctgctgtgtgtgtgctgggggaggtggcaagtggggggatgcagcaacacagggcctatccacacatcctgaaggacaggcctctgactgcaggcagcacggtgtcaccctcagcccacctcctcctcttcagatacctgtctcttgaattctttgcaaactcccgtctgctgagtgctgggtgagcagaggggctgcttgcaaggcagtgagttctagctgagccagttaagagtgagtggcccccctgcagtgtggggcatagccgccgggctggggagaagttcccatctgaggcttcagtccctgagctcagatggaccccactgggatgccagctgtcctaacactctccattgttcccactttcttagcagggagagagacagaaagagagagaggagagtgggaggggggagagagagagaaaggagagggggaggggggagagagagagagaaagagaggagagaagggaggggggagagagagaggaggggggaggggaagggggtggggaaagagggagggaggtgggagagagagacctttgatgatctatcctttgcattctactcctagctacttccagaaagcatttgaggaagcaccagtacagggataagagatgaagagacaggccaggtcaggctcaccaagcaggtaaccggaacctttaattttattatgtggaatgcttaatgcagagttaataggggctagagtggctaggagaggggactactgagataaataacaggagacagtaatgagttacatgtggatttggggggctgcagaacaggaaaataggggcagatatagctacatactttattcaaataccactgggaggcaaggggtaagaggcaagggcagaatgtacaggtcaggattctagtgtcttcagcctgccgacagcaacctgggtgctgggccctgtgtctcctggagccaagggttagggcctgagcagctgtcactctctgggaagcccagggagtggggctgactgagcaggggccatagagcctagtaagggaagagggagctggcaaggagcccagggagggaggctctgtgaattgtctctgattcctttcctggagcccctgcctcgtcacctcctgggatgcgtctcaaggtcatggaggttgtagtggaggaggactgggggctgtttctcagacaaagaatgaggttattggcacagaattggatcagggggcctctgtgccaactccttcctgccttcagaaagggagggggcattgaagggatgagaactccactaagtccctcgaaccccccactccccaatgaggctcctcaaagctactctcagcccctgagtgggagacacggccagctctgggcacagtctctgggtggcctagcccttaggcactgtggcataggtggcatgggcatgtcagaccctcactatctgtgagagagaaaacaggagtcataggagtggtaaggcctccgatgccaccaaccctggtgcttcccctccccgaggagggtgagcaggcccttctcaggtcctgggatagagggtcattcctgggggaaggtgcagcccctcatctttcagtgtgggtgcaacagtcaacctccttctcctctgtccagcctgttctcctggggctttgctgctggagcctggatggggcgggtgggtcatcagggcagtgagccagacagaaagccccccgacctgtcagcctcttcagcctcctcagcctcctccactgccaccaccaggcctgaggtgggcaaggaacagggcacacaggctgggggcaggggctgggcggggggtggtggcgacagggccccctttagggccgggacagtgtcgtatatactggctgctcccagtgtgtggggctgtgggactggggccctgaggggctggggtcagagatggccgtgtagaggggccgctgcgagggccccatataggagaaggccgagtagaggccagaggcctggcccgagtggccataatagggtcctgagggctgatggtcagagtagtcaaactgggggcgggagatggaggggaaggctgagccatagtggggcaggctgagggaggtgtaggcgatctgtgaggtggatggctggtcggtgtagtgtgggggcccctggggccccgcggtctctgtcttcacctgggctttggcatccacaccaggtggtgagaccgtgggcagagccacgcctggtggcttggagatccaggcggagtgtccactggccacggccagggcactgcccagcccatagccggctgctgagtagctgctcacgtggcctgggtgcccattgggcggcaggtactggtccaactcagccacatcaaaggtctccatgttggacattacctcgtggctgatctcaccaatgtccacgttgccgaagtcgatgtgaggcttcccgccctcccccatggagcgcccgtcccgcttcgggtctgccttgcccgactgcagctctgtcttcggggtggttggaggggtgggtgggccatggctctggcctgggtagaagggagacagagagagagagcgcaagggggaagcaggttagaggcaggtgggcgcacgtgaacttccatggttcaccttcaggcagcgggtgcctctgggaaaaccttgtaagtttcacattttggcagcatgagtcgggtttttttttgttttttttttttgagatggagtttcgctcttgttgcccagactggagtgcagtggcgccatctcggctcactgcaacctctgcctcctgggttcaaatgattctcctgcctcagcctcctgagtagctggaattacaagcgcccaccacaatgcccagctaatttgtgtatttttagtagagacggggtttcaccatgttggccagggttgtcttgaactcctgacctcaggtgatccacctgcctcggcctcccaaagtgctgggattaccatcatgagccactgcgccccacagcatttgtttaaatactggtgtcttagattgatctctagttgtttatgaaattctcaaatcttagggatgggtcctggggaggcctgcctcattctgaaaaaacctttcctgtggaaagttcttcctctcatcagcttctctgctgtccaggtggtctggcccagcctttgcgctctgccagccccgcttccacacccatgcctactgtcttccttgctgagcctcgctcgcccaggctcctgagtgctctgtttcacctttgctggttgcctgggcctgctccctgtcctggcctcatgttgtgtcctttccaacccttccctcctcctgagcccaccctgcttcccagcccactggcaagcccttagccccgtcatatgctggcctgtgttgccctgttgttctttgagctgccttcctccatgggagggcacttagaaaactggtccttgttcctttgtctgttcactttcctattcacatattaatttagcaaactcttagggagcattacaaaatgccaggtactgtgccaggtgctggggatactaatgtaaataaaatggatccctgttcccaaaagctcatagtctagtcatagatccatagatccacatgcacccagagttggaagtgctgtggtgacaatatgcaaggacttgggagatcagaggaggagtccacccgctgcctcagggatttggggaaggtttgatcagggaaggatgtctgagtcgggtggggccttgaagggtgagaaaaagtctgtgtccagtttcattctgaggtggttgctctgtatgtggtccagggtctcctgatgtgtgtgtgtgtgtccctgaatctttgaaggtgaagagtatgtacacgtgtgtgggagggatgactgcctggcatcccaatggagacagaacatgtccatggtcttaagagactaggagctccccaaggacaggcctgtgcctccttcatcagaccagaggcagcgccaagtcctgcattggccaagggctctgtacttcaagagacctgcctaggcttttgaatcctggttctgtgtctggacaaatccccagtcttctcttaactagtttccttatcagtaaaatagagattgtaccaagcagcccaggcattgcctctttctggaagccttccttgacaagagtctggtgggcagtggggtgttcttggagacctgactggatgggatagacggccatgccacctctggatctcacacagacttcttgtgcacttgtttctctctctatatatatactatatatatagtaagagataggaggctgggcgtgctgggtcatgcctgtaatcccagcactttgggaggctgaggtcaggaattcgagaccagcctggccaacacggtgaaaaaccatctctactaaaaatacaataattagctgggtgtggtggcgtgcatctgtaatcccagctacttaggaggctgaggcacaagaatcgcttaaacccaggaggcagacgttgcagtgaaccaagatggcaccgctgcactgcagcctgggcaacagagcaagactccatctcaaacaaaaacaaaaacaaaaaaaagacagagtcttactacattgcccatgctggtctcaaactcatgggctcaggtgatcctcccacctcagcctcctgtgtagctgggactgcgggcgcattccaccatgcctagctttgtttcttcctgtacttaattcactcgttttcatccctgctcctctctctagactatgggcccctgaggccagggactgtaggcttctctggttagtacccctggtgtccactccagtgtttgacacaaagtaggactcagagcgtgtcctctgaaggcagagctctgctcactgagcacttcccatgtggcagacctgtgtgtgtcactttctgtacattaggaacacaggcaaggcagctgtggtgccaagcagatgcccgggagccaaactggggaagttcctgtttgtttctcatcagtaaaatgagagtaacttgccacagctgagatctgagcccaggcagtttgggtacctcatcacattgtttgcaaggattgagttagtatacataaggcaactagcacctagcacagtgcctggaacagagtagctgctcaattaaggttagctgttattatcattaatgaaaattaaacaagatagcttatgtctggcccatccatggccagacacggtatcacatgccatgtctcctctgtcagaatggctggtgggatttgggaggccgaggcgggcagattgcctgagctcaggagtttgagactgggcctgggcaatatagtgaaaccctgtctctgctaaaatacacaaaatgagccagacgtggcggtgtgcacctgtagtcccagctacttgggaggctgagacaggagaattgcttgaacccgggaggaaaaggttgcagtgcaccgagatcatgccactgcagtctagcctgggcgacagagtgagactctgtctccagaaaaaaaaaaaaaagaatggctggtgggaaagaggcagtgatttcctctcctccatttgctcttccatttctcaaaaccatcctgtcttctccccctttacttgtaactgccccagccacctctcactccatgacctccacagagtctttttttttttctttctctttgagacagagtctcgctctgtcgcccaggctggagtgcagtggcgcgatcccggctcactgcaagctccgcctcctgggttcacgccatcctcctgcctcagcctcctgagtagctgggactacaggtgctcgccaccacgcccagctaattttttttatttttagtagagatgggatttcaccatgttagccaggatggtctcgatctcctgacctcgtgatctgccctcctcggcctcccaaagtgctgggattacaggtgtgagccaccacacccggcggcctccacagtctttaactggccctctttgcccagtaggatcagccctggccagagccatctcacccagccacttcccctggcaccggaacccccatggagctccctctgggcccctgcagctctgctggggcaactgcacagcctggcacgctctccctagagtccagggtctcattgccatccagccatctcctgtctccactgactggccttgccccaccctcagctctgtcatcagcactcacctgaggggtgctcggggttcccatctgacatgggggagccctctcctgggtgccggtggtccaagtgggcgctcttgtagtgggcctggatggcggcggtcccaccttgctcggcctccccaccggggcactccgcctcgccctgggcggccttcccgttcttccgccgcctgggctggtacttgtagtccgggtggtctttcttgtgctgcatacggagccgctcagcctcctcgatgaaggggcgcttgtcactttcgttcagcagcctggggtgtggtgggaggcggagaggacagcagaggggctggcgtgaatgccagagcactccaggttggcctccctctgagtgtccatcttggaagatgtgaggccctgggatggggcacccagaggacaggacccggggtgggggctgtgccctatgatttgtggactgagagatgtgaggcccaaggaataacagcctcagagggctgcccccaaatctttcatgggctggagggtgagagaggggtcagcccgctgctcctggcagcccctgaggaggagttagaagtaggagtagaggtttcaaggggcagatgccagttcaaggaaaggaaaaactttctcatcatcaaagctgtctgcaagtggaattggctacttcagtgggggtgagctccctgggactgagggtgggcaatagaagcagcatggctgggggagaactcagtctctgctacttactagctgtgtgtgtgaccttgagcaaattacttctctgagcctgagtttcttcacctataaaaggatgataacattggcttaacttgggtgtgggattggccagaataatggatgtgagatgccttgcaccagggcctgggaagcgggctgagcaccttgaggaagaggtgcttttctttctttcttttttttttctgtgagggaatctcactctgtcacccatgctagagctcagtggtatgatctcagctcactgcaacctctgcctcccaggttcaagtgattcttgtgcctcagcctcccaagtagctgggattacaagcatgcgccaccacgcccggttaatttttgtatttttagtagagatggggtttcaccatgttgaccaggctggtctccaactcctgaccttagttgatccgcctgccttggccttccaaagtgctgggattacaggcatgagccattgtgcccagcccaagaggtacttttctatttttaattttttatttatttagagacagagtctcactctgtcgcccaggctggagtgccgtgatgcggtctcagctcactgcaatctcggcttcctgagttcaagcgattctcctgcctcagcctcccgggtagctgggactacaggcacgcaccaccatgcctggctaatttttgtatttttagtagagacgaggtttcaccatattggccaggctggtctccaactcctgacctcaggtgatccacccgccttggcctcccaaagtgctgagattataggcatgagccaccgtgcccggccccaagaggtgcttttctaatgctgcttgcgggggtggttggacaggaggatctagggttggactcttaactctgggtcctgattgtgtgaattccagtgtggtgggactgagggggcagatgtggctcctctttaccatgggtctgggtggggggtactgcctcctgtgggggatcctatatccttgtccagaaaatagcagagagtagaggaagctagcctctcctcagaccctggaacagtccctgaaaccaacacatggagagaagaagccctgaagccagcgcccttgccaccgactccagccttaggccagggttggagggtggagggcatttagggtttggctgccccagggtgaggagggcaggatggggtaccttacagagggggtcgaggggaaagtccagattctagaatcccagaccttggtactgagaatccatgagtctttgtgggagcagccttgtctgtcagtccagagggcttgtctcttcagctgccccacccctcacaccccagtgagtgccctcttcccccagtcagcagaaggccgagccctccctccccaggctgggcgggggtggtcatgccaggcacctcctagccggcagcagcattcctctgcggcttagcctccctgtctactccccccaccccggccctgagcccagccctagccccagctttctcagagggtccctccagccgagactctgtcagagtcagtgtacacacttaggacaaagatgccggagcagggccttgagagtcagggagtgggatgtgggcaccctctctgacggctgggaccaggggagggggtggagcaggccttgagggtgtgactggggagaacccacagaggagagagctgctccgccagcagtggaccccaacagaggggcttctgggatggctggggacatgggacacagagctcactctttcacctatccttcccttgccccctgcccagctggcagccagcatcagcaagaaagtgacaggggccagaagagagagaggattccaacatcggattccgctgctacctcctaagctagttcccagcattagcctaaccctgacagaaatctaagcctggggccactgccatccccgaccccagctccctcctccaccagctgtgccggacagctgattccacctccaccccaaccccaagcccagcctgcccaccatgtaaacccaatctccagcaccagtccccactcaacattaccagccccaaacccccaacttcgcctccagctctaactccaaacccagtcctcatctgcaccttcctgtcagccctctttctccctggtctcccaggtttggaatgggggcaagaagaggtaggctgattcctcacccaaactggaaaccccaaccggggacctcccacagtggggcactgattgctgctacctgtgtcctgctaggccaggggcataagaagactacttggggaaggggcctgtggcactgggaacagaggctgggtgacccccaccacacaggagggactcttgcctgtgtccgcctttccagtttcttggctctggttctttccaggcagatcagccaacccacaggcaccaccctgtgatcagcctcaactagcccctccccagatgggcatcaaaggttagaatgactgttggggctgacacggccccttaggacctgggctccagtgtgtctgatcccacactcccttggggcactccacacagtctgtgtgtatctttctctttttggttttaagacacctgttttccagctctgcctacctaaccaccccacttcttgacatcccaggagtcacagcttggggaggtttcaggagaagcccctggagcaattggccagcccagcccaaatccaaatgtctctcaggacccccctccagggtccagggagccaccctctgttggcattgcctttgatccttgccatggttctggccccatcctcccattgggattgggtcctcagcaagtagtgccagttttcctgactgccacacctcaggctggcccctgtgcacacagcttgagtgatggccaagaataagtcctcctgaagggagtccaagcccagggttctgggctgggggaacctggggacagggacaatggaggagccaatcttaaacccttggcaatgggagatggagggaaaatgaggtccgtccttgctttgactctcgttgggctcgtactgtggtcttctcatggtccccagagtctgccctatctgtatgtctctcctggttgtctgtttctcacttgctctttgtcccctggcactaaagatactggcctgggccaagccccacccagatctggatggaccttgggtggaggagctagctgtgacctctgctcttgggcagaactgggctgtctgggtccacacagcgggctggtcgctgagccctgggcctgccctgggtgagcagggcactgagggctgagaaggggcaggggaaggggcaccaggtcttcagcaaacacatggcaagaacaggccagggggcgggatgtgaatcttttggtctcttggagatcctcctgcaccttctaccactctaagcctctagacccaatctctacccaactgtggctggcaagggggagggcagcggaagagagccgggctcctctgacaaagccctaattttctggaacccagatgctcctcactcttgttctcatcttcttgcttccccccaacctcctgaccactcctcaaagtgtaggtgatccaccactgtcaccagggtcaggggaagtcctctggacagagagtatgggagtcctgggttctggccctggctctgctaccaacttctatgtgacctttgtgattcctttgcctttctgggcctgtctcttggtcagtctagcgagaatcaggtgactgctaccggctcacatctcctggagtccctggtctctttcagagctgctctggcactcccgggtgggagtgggggactgtcttgttccacacatccccaggaggcctggctgaaccccagacctgagtcgagggtgggataattgctccctgcgggggatgtttttcctagaggtgtgggctggtcccagggaacctgggactctgagggcccctgggcaggaaggaggccaaggtttccttctggccagagtgctcagctccagctctggggcagtggggaagaggttgctcaacgttggggtggggccctggcagggaagatggcgccgaactgggagagggaggaaagagatcagcttggtgactctggggcagggcaggagggggagccccttactgtgtgtcctctccctaggaggatgaagaagcccccaactcaaaggagggtggcgtcagaaagtcccagggaagagccctaggataggatgaggtcccgcagcagcagatttgtcccgcagttcttcatccctcactcttccaaagactctcatctgaattccgttttctttaaacctcccctgagttctccatctgactgcctcagtttccctgaatctccagccaaccctttggttctttccaagcgtttccctcgtatcctcctgaccacagcagctggtggcatagtgtgcgtatctgtgggcaggagttagtgaaggcctccttccctccctccaaagccccaggccccacggtctgccacccgcaaaattccaaccacgagggggcgccttcctgcccgccgccccgtagggagacccggcctaggccgctggagttccgagttccagggtccttgtgatggaagggcgggcgcggcccccacacctggtcttccagccctatccaaggaggactgccagacagtcccgctctgaggtgcaggaggccgggccgcctcggctaccctgaatccacccgaagctagagggcccgagcccggggggcggtcgggtgctcacctccagagcttgcccagcgtcttgctgagctcagcgttgtgcaggtgcgggtactggtccgcgagcttcctgcgcgctgcctgagcccacaccatgaaggcgttcatgggccgcttgacgtgcggcttgcttttgctggcgccgttgacgcgcacgggcatgggcaccagcgtccagtcgtagccgctgagcacctggctgacggcctcgcggatgcacacggggaacttgtcatcgtccgcctcgccgtcctgctgctccttcttgaccttgcccagctcgcctggccccgggctggctcgcaggcccgatccgccgccgccgccgtcgggccctagcgagggcgcgctccccggggacaggcagcggggctcctccgagcccacggggctcagctccacctccgataggtcctgctcctccgccatgtcgcccccggccgccgccgccgccgcctcggccgcctcccccgggccagccgccggggtcctcgcaaagagtccaacgcccacctggatggaaggagggcgcgatggagcggccgcgcgcgcagccccgagggcggcccgagacaggacgtgggcacagccccgaggtggcggcccttcctgctccagctaaacccatctggcccctggggcccacgcacatgccagactctaggtgggtgcgtcccgcctctgtgtcttcccaccacctggtcccaaccgtctcttggtgtgggtggctttttttttagcctccttttttgggtggaggtttgttgatgataaggaagaaaaaaacggagcctttattttgctctaatcccggcccctggaatttcccaccttttctctcacctttccttcttccctcagcctgccccaacggggtttagaggagagccaggtggggggcaagggcggggtgtcgcctctctccacctcacagcagggtcccaggcctgggcgggccagggaggagcaggctgcgcactcacctcctcggacctctcctccagtctggggctcgtccttaggaagtggaaaaccgtgtcccaaggtgtgcggtccagctcggggctgggaggtgacgctggtgggctgggagggaggggcggggggccctgagcctcaggccacggcctcgttaggacggagcctgaatccttaccaccaaccaccctggccggacagcccgagactgactgagcgactgagcctgagccgctgcggagggctggggaaggaaggagggggagaggggggaggggagaggagggagggaagggcagaaggtggagcctccaggctttccttcatccccaacactcagggctcctccacccggagcccaggcccccccacccagctccctgccctactgcccaggcccatcttgctgaggcttatcttgggcttagtctgggaggtggaggggaggttaggccgaggaaggaagagatgtaggctggagggtcagaacctgttggatggaagaaaattgggcccaaccaggactcctaacgtctgcctcaggtggcaggatgggcacttggcaggggactagggagagacgtgaaggcggtgagggtcctgggggcccgtgagggtggctggccctagctgcttcgtctgcgaaatcctgttgagtgcctagtgtgtgccaggcactgatgcccagctcctcaccctgcctcctaccttttcccaggcagccctttctgccccatcctgcacagtaagagagacttctcagggatccctctgagaagtgcagagccccagcttgacccctggtcccttctctgcagacacccagcacacgcgcgttctggtctggttcaaggtggaaacacaagactaaagctgccaggaggccaaggtgggacaggttgggggccctctctcagtaggtcttagaggcattttgggttgctacctactgggacccagctccttccacactgggctcaccctgtcttgggagagggtaggggagtcctagtcctgattgtcacgaagtcctctactcccccaccccaacaaggggtggggacttgccctgcctcttccctcctctgcccacctctccctccctccccttttctttcctgcccatcctccgttgacacctttttctctctctttccttggcctctcctccaaaggtcgcagtgctgttctcttaactgagggcagccccgccggggtgttgaggccgaggtggggtgtatgtgggttatgtaatggagctggggtcgcattggcaaccatgtgacgttctgagctcctcaacagcagggcaaagccccaagaccaccccaaggggtcctgtctggagtgggctgcaaagggtctggggaggcaaggcctcatgcttgggaaagtccaaaggggtgtagggggtgggaaatgggacacaatgaggtagtcacacgaggcagaggcatgttgggggtggggggagcagacactggaacacacacacacacacacacacacacacatatgctcacacacacaaccagccagacaatcgggccagtgtgtctggggcctcggagcccagtgaattaggagtttgataagggttttctctttctctcgcttgctggccttggacaatctccccccagttttcctcgacgccacccccggcgctgccaaccctcctccccccgcctcccttctcttccctgtgcccagactcttgttcggggccttgaaacagtgagctgtctttgttcgaaatacaggtgaacggcaatcatgtgattaacacacacacacataaaaagctttttaacagcgcccgctcggcctcagaaccgcccggagaggagccgccctggatggacagagggacgagggacgagcatctgccgtcgtgtcccggctgccctgcagtcgcctccaacacccgctgctgcccgcccgctgcctgcctgcctggcatctctctctcccggtgggtccccactcatccttccacccctcagttcctcctctttgaggaaaggacctccccgctctctgctgtgtctgtgactggcctgagacccgcctggggcaggaggggtggttgtggaaggaaagagcccagagttaggaggtggaatgtggggtcccacagctgccccctctctaactccctgcttcctcctttgccctccttggtccagctgtgccaggatgggggtgggggtagcagtgggcacgctctgtctgcaggaagccacgctagacagaaggggccactccctctctctctcccttgtccccgcacagacactgccttcctctcagggctgtgctgggctttttgctgagcagtgttgggtgaggcaggtgggcctgcagggcgggtgggaagggctgtcagatgaccagtgctgtgtgtgtgtggttggggcccctgctgcgaacacatccctgcccaccatgctggcaactg

SEQ ID NO: 870 - DNA, 2911 bp, Homo sapiens
aatcggtggccgccggacacccgcggcgaaggcggctcgggctcgggctccggatgtgctaggtgtgggccggcccccacccgaccctgacaagtgaccatggatcctggagccgggtcagagacatctctgactgtcaatgagcaggtcatcgtgatgtcaggtcatgagaccatccgagtgctggaagtcggagtggatgcccaactccctgctgaggaagagagcaaaggactggagggtgtggccgccgagggctcccagagcggagaccctgctgaagccagtcaagctgctggtgaagctgggccagacaacctgggctcctctgcagaggcaactgtgaagtcacccccggggatccctccgagccctgcccctgccattgccaccttcagccaagccccaagccagcctcaggcatcgcagaccctgacgccactggctgtacaagctgccccccagtattgcaggtcaagtggctggtcagcaggggctggccgtgtggacaattcctacagcaactgtggctgccctcccaggactgaccgctgcttctcctacggggggagtgttcaagccacctttagccggtctccaagcagctgctgtgctgaacaccgctcttccggcaccggtacaagctgccgcaccagtacaggcctcctcgacggcccaaccccggccaccagcccagccccagacgctgttccagacccagccgctgctgcagaccacacctgccatcctcccgcagcccactgctgccaccgctgctgcccctacccccaagccagtggacacccccccacagatcaccgtccagcctgcaggcttcgcatttagcccaggaatcatcagtgctgcttccctcgggggacagacccagatcctggggtccctcactacagctccagtcattaccagcgccattcccagcatgccagggatcagcagtcagatcctcaccaatgctcagggacaggttattggaacccttccatgggtagtgaactcagctagtgtggcggccccagcaccagcccaaagcctgcaggtccaggccgtgaccccccagctgttgttgaacgcccagggccaggtgattgcgaccctggctagcagccccctgcctccacctgtggctgtccggaagccaagcacacctgagtcccctgctaagagtgaggtgcagcccatccagcccacaccaaccgtgccccagcctgctgtggtcattgccagcccagctccagccgccaagccatctgcctctgctcctatcccaattacctgctcagagacccccaccgtcagccagttggtgtccaagccacatactccaagtctggatgaggatgggatcaacttagaagagatccgggagtttgccaagaactttaagatccggcggctctcgctgggccttacacagacccaggtgggtcaggctctgactgcaacggaaggtccagtctacagccagtcagccatctgccggttcgagaagctagacatcacacccaagagtgcccagaagctaaagccggtgctggaaaagtggctaaacgaagctgaactgcggaaccaggaaggccagcagaacctgatggagtttgtgggaggcgagccctccaagaaacgcaaacgccgcacctccttcaccccccaggccatagaggctctcaatgcctattttgagaagaacccactgcccacaggccaggagatcactgaaattgctaaggagctcaactacgaccgtgaggtagtgcgggtctggttctgcaatcggcgccagacgctcaagaacaccagcaagctgaacgtctttcagatcccttagggctcagcccctggccctgtgttctagcactttgtccatttcccgtggcatccggctgcagccactgccatgacagcacctgtcattttgccacgtgcagctgtgctcaccccaggtcatcagactccaccgtgtgcatgtgcatcaatgtccctcttttctcccacacatctcacatcatggggaggccagagggggccacacgagagctccaggctctgggctggtcactccgaagaagaggatttgtgacgtcacttagagaagcaccttgctagcatggtttctgaagggtgaattctggtggggaaccagaaactccctgtctttggggcagggctaaagcagctcctaaggatcactggccattagctcttgcttttgatggcattctctttccaccttgtcttctcctttgctcctctgtgttagtgtggcaggtatgacaactcatccagtggaaacacagcctcacactgcccttccgccccccacactttgcctgcaggtgcaccgaaaggacctgggagataaaattcaaaaaagtgtgatgtgctgctcagaaggtcagactccatgtctgccttgacctcaaggtcagaaggttcccaaacccctggggctggaacatgggatctcctcttccacctcttcctggttcctttgcggggaaaattgcactaaaacagaaccttttcttaatccatgttggaaggaagcaacagtgaactctacctgttctggagttctcctgggtctgcagaaggttgggaatttagaaaataaggctgttctttcatattttaatttaatctctgtcaatggccatccctcccacaaaaaaacgtgggttaagagaacttgcagactggatatgcaagcaaacgggcaactctggagaaaaataaggaaaggaatgctgactttctctttctttctcttgtccccacacccattcccaacccaatactggggccttctcaaaaggagcaaattaaacaataaaccagacagcaaggccctgggggaaaggacaacatcctgaaataaatgatggagcccagg

SEQ ID NO: 871 - DNA, 5000 bp, Homo sapiens
tctagagttctctagcatatcttcaaatggacccatttttcctgtgttcgtctggcccatcttattacaatgctgttttttggttttttatcataaaacattcattctatacatttattttcatctcaaagtaatgatggccatatttctgtgtgattataacaatcttcaaataactataaatgggaacaaaaataaacatgcagctaaatgccaggtaattttattttattatttttgagtgagacagggtctcgctctgtcacgcaggctggaatgcagcagtgcaatcagggcttactgtgaccttgaagtcctgagcccaagcaatcctcccacctcagccttctgaacagtcagaaccacaggcacacatcagcacacctggctaatttttaatttttttttgtagagatggggatctcactatgttgcccaggctgctctctaggctcaagtgatcctcctaccttggcttcccctgtgaacacaggcacgtgccctggctagttttaaaaagtttttttttttttttttttgtagagatgagagtctccctatgtcgcgcagggtggtctcaaactcctgggcttaagccatccccccaccttgtcctcccaaagtgctgggattacaggcatgagcccaccacaccttgtctcatgccgtttcttaactccctaatagctccctagtccacacagttggctcaagccagattctgcaagtcatccttgataccgtcctcttcctcattcccttcaatctgtcatcaagacttgtcagttctacttctgaaacacttcttgaattcatctatttatcttcatctccatcactaccacctgagtcctggccaccatcttctcacctctggactttggcaacagcttcataaactggtctccccacactcgtgctgcttcttccaatccacccccgagagagatattttattttactaaaaaaataaaatgggactacaggcacatgccaccacatccagctaatttttttagtttttattttttgtagagacagtcttgccatgttgccaaggctggtcttgaactcctgggctcaagcagtactcctgcctcagcctcccaaagtgttgggtttataggtgtgagccaccttgcctgtccccagagaggtattttaaaacacaaatcctcatcttaccctggctctgcttaacagccttcagaggcgtccagtggcccatagataatgtccaaggctttcctgtgatctaccagtctggtcagtgtgaccacctttgcaagctcatttcagacactctcccctcaccttcctcagatccaggcacgccttcctcagatccagccacgtagggtgcttttggttcccaaacaggccaacccatctgtctcctcaggagctctcaatgagctgatctctctgctatttgctttttcaaggaacccttccctgaccacccatccagttataatacatcaccccttggcaccgtgggcttttccttcactgcaccctcttctattagttgtttttcctccttgtgggactgtaagccccaggagggcaggcaccatggctgtctgacccactgctctgtcaccattgccaatcctgatagttactgatagggtgaagatggagtgtctggtatcgtcatatcccagtcccaggacagctgtgtggccacctaccatttggggactgttttctttttaaaatttaaaaaaaaatttaaagtctacaccccatgattctgtatggggactgttttcttttagccccaaagtccaacaggagcaaatcctttagtggctcttaaagctagagttcagccgtttggaggaaagggtgacagagctgacccacagggtagatgcgacatcttcccctggagcactaaggccaaacaggagccccctggacgtttgggagcaggctttacaagccctgcctaaagctaagatgtcattagagtgatgcgttgcatacctgccttgttctctaaggaagctttggtgttttcaagacaggccctctcccccctggcccattgtccttacttgttttcattctgtatagtgctgttattacgggtcaggcctccttgcactcatgtgaaatcgttgagaacctactcaattagaaagttctgaacagggccttagaggagtgggggctagaaagatgaacctggggccaggcacgggggctcatgcctgtaatcttaacactttaggaggcaggggctggaagatcacttgaacctgggagctggaggttatggtgagccatgatcacaccgctgtattccagcctggatgacaaagcaaaacccagtctctaaaacataaaagaaagaaaggagggaaggaagaaagaaaggaatgaaagcaagccgaatctgctctgagggaaccagtatagcaagacagaatgtaatcaagtatcttaagagtggcctaggcttggctgggtgctgtggctcacgcctgtaatctcagcactttgggaggccgaggcaggcgaatcatttgaggtcgggagtttgagaccagcctgaccaacacggagaaaccctgtctctactaaaaatacaaaattagccgggcgtggtggcgcatgcctgtaattccagctactcgggaggctggggcaggtgaatcgctcgaacctgggaggcggaggttgcggtgagccgagatggcgccattgcactccagcctgggcaacaaaagcgaaactccgtctcaacaacaacaacaacaacaacaacaacaacaaaaagtggcctaggctttttggggaacaaattggttgtggctggccctcagggagcaagctttgcggcatagcagcgtaggctaaaaggtcctccccggagacaaaatctgcagggaccacggggtgggaagcatcagaaggctgcccactctgactgcaaatacaacaagctggagtgttcctagaagaggcaatttcttccgcgtgtgtgttggggacagcctgtgtgtgtgaacattttctgcccttgccgcgcagggctgggtggaccaggaaccacgcccagaggaagagacttattacctcttggccatgtctgtctccagaagaaccgacctttcctgctctatgtgcaacaagacacaccttccgaggaaggaggcgaacaggatttccatcattactactgccctattaaaacacacacatacacacaactgtgtaattagcctctgcaggaaaggcgcacaaacaggatgcgttcgagctgaccccgggatgagccatccctgtaaatattaggaaaaagaacctccccgccgtgcccccgcctccggccagggcctcttggggatggccctgcagggtcaccagcccaccggggaggttgggagagagggggcgggcgactcctcgccgcgcgggttcctggctggagcgccctcctctgcgtcctcccaaccttccatcgctccccaggtcagtctaccacgcctcaggtgtttgctcgggctgggccacgaaccctttcctttttggcctgcgcccggggtggcccctaacccgcagcgcacggccagacccagcgctacaaggagggcgcgcagggcggcgcaagcgggcactggcctcccgggggcttgcgcggggatccacccaccgcagggccgggccgcggaccgcgggccacgcccctggggtccggaaggcgcgggagcggacgcgggggttctgtgaacttggaacctggcggtgcgaggttctcgccggggatgcggcggcggcagctgcttcctggtttgaagctcgccgagtgggggagacgtgagccttcggaggcgggggcaggaggagaagcaagaggaggcgggggaagagacgcttggggctggggctcaccggacgggtaggtccggctctccagggagaggagctgcccggccctggagaaggggcgagtcctgcgcgagtccccgggaggcgccgcgcgcttggaagggacggtcgggcttccccggcccgctgagggctcggcggcgggctcccctcctttccacctcgggagggagggaaggaggggagggaaaagtcccacggaggaggcagaatggccagtcgaggggcgcttaggcgctgcctttccccagggctgcctcgactcctgcacctgtcccgagggctggcctgagacgggactcccggttctcccgctgcgaagcagcgcggccccccggggccggggcagcggcgccggcatgtcgtctggcaccatgaagttcaatggctatttgagggtccgcatcggtgaggcagtggggctgcagcccacccgctggtccctgcgccactcgctcttcaagaagggccaccagctgctggacccctatctgacggtgagcgtggaccaggtgcgcgtgggccagaccagcaccaagcagaagaccaacaaacccacgtacaacgaggagttttgcgctaacgtcaccgacggcggccacctcgagttggccgtcttccacgagacccccctgggctacgacttcgtggccaactgcaccctgcagttccaggagctcgtcggcacgaccggcgcctcggacaccttcgagggttgggtgagtagcggtgaccccttccctttgtgtccacccaacccccgttccccttatgtttttcaaaactcacccgggtcccgctttcccatcgctttgtggctgagggaattccctccagactttggtcttcgtccaggtggccgcggcactggtgacgcgaccgcggtgggtgtgtgcaggcgcaggtgtgtctccaggaagccggcctggacacgatcccctttcaggacagcggcttggcctaacgggaagtcgggcaggggtccagggcggtcaccctttccgcccagtctttgggtaaggagctccaactttcagcacgcgagtgataggtaggaaaggcagggaaggagtgatacaaaagggacttgatttggg

SEQ ID NO: 872 - DNA, 3255 bp, Homo sapiens
ggagcgcaaatggcgtccaaccccgaacggggggagattctgctcacggaactgcagggggattcccgaagtcttccgttttctgagaatgtgagtgctgttcaaaaattagacttttcagatacaatggtgcagcagaaattggatgatatcaaggatcgaattaagagagaaataaggaaagaactgaaaatcaaagaaggagctgaaaatctgaggaaagtcacaacagataaaaaaagtttggcttatgtagacaacattttgaaaaaatcaaataaaaaattagaagaactacatcacaagctgcaggaattaaatgcacatattgttgtatcagatccagaagatattacagattgcccaaggactccagatactccaaataatgaccctcgttgttctactagcaacaatagattgaaggccttacaaaaacaattggatatagaacttaaagtaaaacaaggtgcagagaatatgatacagatgtattcaaatggatcttcaaaggatcggaaactccatggtacagctcagcaactgctccaggacagcaagacaaaaatagaagtcatacgaatgcagattcttcaggcagtccagactaatgaattggcttttgataatgcaaaacctgtgataagtcctcttgaacttcggatggaagaattaaggcatcattttaggatagagtttgcagtagcagaaggtgcaaagaatgtaatgaaattacttggctcaggaaaagtaacagacagaaaagcactttcagaagctcaagcaagatttaatgaatcaagtcagaagttggaccttttaaagtattcattagagcaaagattaaacgaagtccccaagaatcatcccaaaagcaggattattattgaagaactttcacttgttgctgcatcaccaacactaagtccacgtcaaagtatgatatctacgcaaaatcaatatagtacactatccaaaccagcagcactaacaggtactttggaagttcgtcttatgggctgccaagatatcctagagaatgtccctggacggtcaaaagcaacatcagttgcactgcctggttggagtccaagtgaaaccagatcatctttcatgagcagaacgagtaaaagtaaaagcggaagtagtcgaaatcttctaaaaaccgatgacttgtccaatgatgtctgtgctgttttgaagctcgataatactgtggttggccaaactagctggaaacccatttccaatcagtcatgggaccagaagtttacactggaactggacaggtcacgtgaactggaaatttcagtttattggcgtgattggcggtctctgtgtgctgtaaaatttctgaggttagaagattttttagacaaccaacggcatggcatgtgtctctatttggaaccacagggtactttatttgcagaggttaccttttttaatccagttattgaaagaagaccaaaacttcaaagacaaaagaaaattttttcaaagcaacaaggcaaaacatttctcagagctcctcaaatgaatattaatattgccacttggggaaggctagtaagaagagctattcctacagtaaatcattctggcaccttcagccctcaagctcctgtgcctactacagtgccagtggttgatgtacgcatccctcaactagcacctccagctagtgattctacagtaaccaaattggactttgatcttgagcctgaacctcctccagccccaccacgagcttcttctcttggagaaatagatgaatcttctgaattaagagttttggatataccaggacaggattcagagactgtttttgatattcagaatgacagaaatagtatacttccaaaatctcaatctgaatacaagcctgatactcctcagtcaggcctagaatatagtggtattcaagaacttgaggacagaagatctcagcaaaggtttcagtttaatctacaagatttcaggtgttgtgctgtcttgggaagaggacattttggaaaggtgcttttagctgaatataaaaacacaaatgagatgtttgctataaaagccttaaagaaaggagatattgtggctcgagatgaagtagacagcctgatgtgtgaaaaaagaatttttgaaactgtgaatagtgtaaggcatccctttttggtgaacctttttgcatgtttccaaaccaaagagcatgtttgctttgtaatggaatatgctgccggtggggacctaatgatgcacattcatactgatgtcttttctgaaccaagagctgtattttatgctgcttgtgtagttcttgggttgcagtatttacatgaacacaaaattgtttatagagatttgaaattggataacttattgctagatacagagggctttgtgaaaattgctgattttggtctttgcaaagaaggaatgggatatggagatagaacaagcacattttgtggcactcctgaatttcttgccccagaagtattaacagaaacttcttatacaagggctgtagattggtggggccttggcgtgcttatatatgaaatgcttgttggtgagtctccctttcctggtgatgatgaagaggaagtttttgacagtattgtaaatgatgaagtaaggtatccaaggttcttatctacagaagccatttctataatgagaaggctgttaagaagaaatcctgaacggcgccttggggctagcgagaaagatgcagaggatgtaaaaaagcacccatttttccggctaattgattggagcgctctgatggacaaaaaagtaaagccaccatttatacctaccataagaggacgagaagatgttagtaattttgatgatgaatttacctcagaagcacctattctgactccacctcgagaaccaaggatactttcggaagaggagcaggaaatgttcagagattttgactacattgctgattggtgttaagttgctagacactgcgaaaccaagctgactcacaagaagacctcttaaaaatagcaacccttcatttgctctctgtgccaccaatagcttctgagttttttgttgttgttgtttttattgaaacacgtgaagatttgtttaaaagtaccattctaatacttcttcaaaagtggctcctcattgtacttcagcgtaaatatgagcactggaaacagtttcatggagtttaagttgagtgaacatcggccatgaaaatccatcacgaatacttttggatcaatagtctatttt

SEQ ID NO: 873 - DNA, 1710 bp, Homo sapiens
ccgggaacgggcggtggggagcgggcggagctggccctgcctctgcctggccggcgccgcagtcggcgcgggccgcgcccgccgccgccaactgccctgagcgcttgctgaggccgagggagacgtcggggcctgcacctggagggagcctgccgcgctggccccgaggagggggcgttgccatggcgacagcctctcccgctgctgacggggggcgggggcggccctgggaaggagggctggtctcctggccccccgcccctccccttactctcccctggacttggatgggcccgagttgggggcaacaccccgggcattggggctttccagctctcacagaaccttcagcatccccagctgccggtcttggcatcttcgaagtaaggagagttttagatgcttctggatgttcaatgctagcacctttacagactggagcagctcgattttcttcgtatttactttcaagagcaagaaaagtgctgggctcccacttattttctccctgtggtgttccggagttctgctccatatccaccagaaagctggcggcccacggctttggcgcatccatggcggcaatggtgtccttccctccccagaggtatcactactttttagtgctggactttgaggccacgtgcgacaagccacagattcatcctcaggaaatcatcgagttccccatcctaaagctaaatggccggaccatggagattgagtctacctttcacatgtatgtccagcctgtagtccatccacagcttaccccattctgtacagagctcaccgggattattcaagccatggtggatggtcagccaagcctgcagcaagtgctggagagggtcgatgaatggatggcgaaggaaggcctcttagatccaaacgtcaagtcaatttttgtcacctgtggagactgggacttaaaagtcatgctcccaggccagtgccagtacttgggcttgccagtggcggattacttcaagcagtggattaatctgaaaaaggcttacagcttcgccatgggctgctggcccaagaatggacttctagacatgaacaagggcctcagcctgcaacacataggccggccccacagcggcattgacgactgcaagaacattgccaacatcatgaagacactcgcctatcgaggcttcatcttcaagcagacatcgaagccgttctgattggccgaggacaggatggggcacgacagggtagctgtttggcccagcccagaatcctcctctccctcaccagaggggaagagggagagtggcatagctctgtgtccagagtgtccccagctgccctgtgggctcatgcccttggcgtgggcttgtgcccttgcaagggcttggccacttggcccttctggagcagacactttgtgccccccatccccacccctcaatctcagcccagtatcagcccctcccattgcgggcctgggctagggggacccaggcactcaccgcctcctccctggtacacaggcttctgtggggccaccaagcccctcctgtgccccctcccatccatagtgcatggtgtgtggtgcccccagggctccaggacagatcaggccccaccttgtgtctacccccatccccgctgtgaacgtgccactgaataaagtcggggaaacgaggcactgggtgtgtgtgcaaagccaaaaaaaaaaaaaaaaaaaaaaaaaaa

SEQ ID NO: 874 - DNA, 1782 bp, Homo sapiens
agaatccccgcgtgccccttcctcactaccctccaaatcccgctgcagccattgccgcagacacgatgccgaaacgaaagaagcggaatcatcaccagccaccgacacagcagcagcccccgctgcccgagcgggaagagactggagatgaggaggatgggagtcccatcgctcttcacagaggtcctccaggatcaaggggaccactgattccaccactgctgagtctcccacctcctccttggggtagaggcccaattcggagagggcttggccccaggtctagcccatatggtcgtggttggtggggagtcaatgcagaacctccttttccggggccaggccatgggggtcccaccaggggaagctttcacaaggaacagagaaaccctcgaaggctcaaaagctggtctcttatcaagaatacctgcccgcccaaggatgacccccaggttatggaagacaaatccgaccgccctgtctgccgacattttgccaaaaagggccactgtcgatatgaggacctctgtgccttctaccacccaggcgtcaatggacctcctctgtgagactgtgccttcccatccaggctggaaggagctctctgtgacctagcggccatttatttctctgtagccctatgatggctactgtgaggctcttctaacaccctcagtcagtgacacacccatcccatccaccacttcccccgtgtggggtccagagtggtgttgcatcactggtgcgcggcatacgcgctttcttctgatccagcctgtagagactcgccttcgggacccatctttgcttcctttcagttgcctcctggatcttctttcccgtcatcaaatgactgctgaacaggaaacctctttggtgctgtttcttgtgcatctgtccacctgttccccagtattgccctcaattcctgagagccctggagcggtttcctaccattcccttcttttagctgcttgttttaagtcctttttatgtgacattccctacccccaatgttgtcagctgcttgtgaaactcagccaggttgtctaacctggggtcaagtttgggtgactggtgcagagttacttcctaaaaggccactctccctgcctttggatttcatagtttctctgtcagtagcatgatccccaccgctatggtctatctatgatcaccgtgctttgtgaaactgtgcatccccttgtagcctttctcagtgtccgtggcatttttgtgacttcccagcactagaataagttttcctgccaaaatgagtgaggcgcttggtgccctctggactttcccacttcccaacatgggagaattgtgaactttccatcagactgcctccctggccctccccattcttctcctgttggttattctgagtctgacacagacccatgacatgtcttataaagcctccaatggctttatcctacctagatcccttccagcccattttaattagactatgtcattgtgaggccaccagtccattcatttgaattctgtgaatctccaccttgcctatctttgggtagaagctggacagtactgttgccctcttccaatcctcttcccctacatccctggcactggttgttttctgtgaaaacagcagtgaacaggttcagttttgaactggccctgaggaaatgggtcaggagttgtattggcaagagggaggggtgagagctgttggagaactgagaatgaggtttttttttttttttctttttaactttttttatattagtaataaatgcagtggaaacc

SEQ ID NO: 875 - DNA, 5783 bp, Homo sapiens
ctgcagatcataaatattcagggtaaaaaattgctcctgtactgaacatgtacagatttttcttgtcattattcgctaaacaatgtagtataacaactatttagcatttacattgtattagctagtgtagtgtaagctagagataatttctttctctttttttttttaaacggagtctcactcattgtatcagctcgtgtagtgtaagctagataatttctttcttttttttttagacggagtctcgctctgtagcccaggctggagtgtagtggtgcaatctcagctcactgcaacctccacctcccaggttccagcgattttcctgcctcagcctcctgagtagctgggattacaggcacctgccaccatgtctgctaatttttgtatttttaatagagatgcggtttcaccatgtcggccaggatggtcttgaactcctgacttcaggtgatctgcctgtctctgcctcccaaagtgctgggattacaggtgtcagccaccacgtctggccaagctagggataatttcaagtatacaggaggatatacataggcgatgtgcaaatactgtgccattttatatcagagacttgagtttctgtggattttggaatccatgggaggtcctagaaccaatccccacaaatagtgaggcaccagctacattttagaagttatttgtagtgtaggctgagcgcggacgctcacacctgtaatcccagcatctgggaggccaaggtgggtgtactacctgaggtcaggagttcaagaccagcctggccaacatggcgaaacctcgtctctactaaaaatacaaaaattagctgggcgtggttgtgcacacctgtaatcccagctactcgggaggctcaggcagaattctccaacccaggaggcaggggttgcagtaagccaagattcaccactgcactccaacctgggcgacagagtgaaactaaaatccatctcaaaaaaaaaaaaaaaagttatttgtagtgtaatgggatggtttttgctattataattaaccattaattggggtatggctcatacctgctgtaatcccagctactccagaagccgaggcaagaggatcatttgaggccaagagtttgagaccagcctgagcaatgtagtgagaccccatctctaaaaaattgttttaaattcggcatggtgatacccacctgtagtctcagctgctcaggagactgaagtgggagggtctgaatcagaagtttgaggctgtggtgagctatgattgtgccactgcactcagcctgggtgacagagcttcatgctgtctgttgctcaataatgataataatgataaaaccagttaaatccaagccatatttgaagatttcttttcttttgtttcttttttttttttttgaaatggggtcttgctctgttgcccaggctggagtacggtggtgtgtgagcacggctcactgcagcctcgacctcctgggctcaagtgatcctcttgcctcagcctcccaaggaactgggggtcttgccatcagaccaggtgtaccaccatgcctagctaacatttttttgtagagacagttgcccaggctggcctgggactccggggcctcaagcagtcctcccaccttgggcttcccaaattgctaggattacagatgtgagccactgcacccagctgaggattccttaaggtgatttttctagaatcatttttgctctgttcttttgttctctcttaaatagttagccatttagaaatatttgatgatttattacagtttctattaaaagagattctttagcctgataggcagtagctttcttagctggtcgtcatcacctgtggctttttgaacagatgaggccttggctcagactcagtgcccagagtgacactcgaagacagaattttgaaataatctgttatatgtcaaaatgtaaataatgattgggattatgaataattatttaaaagttatcttctgtgttttcatattttctaccatgagcatgtattgatttttgttgcttttcccctgattacaaaatatgtgcccaggccaggaacagtgctcatgcctgtaatcctaaggtggagatcacttgagccagtttgagaccagcctggggcagacatagcaagaccccgtatctatttttaactaaaaataaaataaacaggccaggcatggtggctcatccctgtaacccatcactttggagtctgaggtgggaagatgcttgagtccagagtttgagaccagcctgggcaacatgggaagactccatctctataggaaaaaaattgaaaattagctgggtgtggtggtatacacctgtggtcccagctactcaggaggctgaggctggaagatcacttgggcccgggaggtcgaggctgcagtgagctatgatcatgccctggtgctccagcctaggcaacagagcaagaccctatctcaaaacccaccaaaatatgtgtctattattaaatttaaatattgcagaggctgtcctggtggctcacgcctgtaactcagcactttggaatcgtgatatgggaggatcgcttgagctcagaagttcgagaccagcctgggcaagatagtgagatgtcatctctactaaaaattttttaaaaaagaaaaatttgggccaggtgcagtggctcatgcctgtaatcccagcacttcaggaggctgaggcaggcggatcacctgaggtcaggagttcaagaccagcctagtcaacatggtgaaaccctgtctttcatgaaaatacaaaaactacgtgggtgttgtggcgggcacctgtaatcccaactactcaggacgaggccgaggcaggagaatcgcttgagcccgggaggcagaggttgtagtgagccaagatcatgccactgcactccagcctgggtgacagaggcaagatctgtaacttactgtcgaaagaagcccattatcaattatctactggtgccaaagcagtttttttgtaagctactattttgatcctagtgttttaaccaatagaatggattgacacgacgtagaagtcgataactgaggtttgttatagatggagtcatattggcctggcatggtggctcacgcctgtaatcctaacactttgggaggccgaggtgggtggatactcgaggtcaggagtcggcaccagctggccaacgtggtgaaacccatctttactaaaaatacaaaaacttagctgggcatggtggtgtgcacctgtaatcccagctactcaggaggctgaggcaggagaatcacttgaacctgggaagcggaggttgtagtaagccaagatcgtgccacctcactccaacctgggcgacagagcgagactccatctcaaaaaagaaaagagtcatatgttgtaggtaacataaaaattgcaaaaagcatgagccagaaataattcaacttggtagacaaaaattaatgcaaaataatcaaacagcaattaaaacttcatgtggtcaaattagttactgaccaaaagttaacaaaagtattaagtctagaaaaaatttaaagcagctaaatttgacctgggaaaaccagacttagaaataatggccacaaaaaaccttttaaaatgacaaaacatcattgataaagatgcagtatgataaaaattaaattaaaccattattggggcggggagtggtggctcacacctgtaaccctgcactttgggagtccaaggaacggtggatacgctaggtcaggagttcaagactagcctggccaacacagcgaaaccccgtctctagtaaaaatacaaatattagccagatgtggtggcacgcgctataccagctactaggaggctgaggcaggagactagcgttactgcagcagaggttcgagtgagctcaggtcgcaccactgcactccagcctgggtgacagagcgagactgtttaaaaaaagaaaaaaactttattggaaattgggtgcatcagcttaatgaaaataatttcagtaaaatgaaaatggaagaaatggagttggtttaactgtgacttgtggtcattattattattttgactttgcacatcctggaatgctatatgagcattctgtgttcatgtagctctttctcattctttttaatgactatatttcattcgaagaatctacagtaatttattccaacttaaaaaaaactagtttctgttttccagaatatgcttttaaggctattaaccagggtggccttacatcagtagctgtcagagggaaagactgtgcagtaattgtcacacagaagaaagtacctgtagtaatactgcccaaatagttaataattgcagaatataagaatttttcagccaagtgcaggggctcacacctgtaatcccagcactttgggaggctgaggtgggcagatcaccttagatcgggagttctagaccagcgtgaccaacatggagaaaccctgtctctattaaaaatacaaaattagtcaggcgtggtggcacatcgtgtaattccagctactcgggaggctgaggcaggagaatcacttgaacctgggaggtggaggttacggtgagccaggatcacaccattgcactccagcctgggcaacaacagtgcaactccgtctcaaaaaaaaaaagaaaaaagaaaagaaaaaagaatttttcatgggtttgtagaaaagtgtatttttatatacaatattaacataacttgctttgaccctgctttcctgtcatccaagaagtgtctattgaacgtctattcgttcagctgtgtggacagaattaacttattaaacttcatggctgagttataacgataacggtgtttctaagtcttttgtctttggggacttgagacaaatttttattaaccgtattccttgtcgaaggaaaagacatagaaaaggtaaatagagcccctgcaaactaaaattgattttaactataaaagtatagtaagacatttattatagctttatttttatggttccatagtattgttttctccaagaagacgggcaaattaaaaacataattttttttataactacacagaaacctgtatgttttttaaaaaattatctttggtttattttgtttattaggacaaattattggattccagcacagtgactcacttattcaagataactgaaaacattggttgtgtgatgaccggaatgacaggtaattaatctgtagatatacagacatctgtagatatacaagccttttgttattttcttcaaattattttgagttttgtattaattttaaacttattgcctgattttcaagtgccatgagtggatttgcagtcttctaagactagtatcaatattttaagagtattgtgagcttttttgaaattatacctataatagaattagatgcttatgctgctgtcggagaaactgggctgagggcctttcatagatgattttatcttattacagctatagttagtagtttaaggggacctaactcagtatatctcaaacctggtaataatggcatcggttagaagtgagtgagaattattatgaaaattattttaggtttgggcacagtggctcacagttgtaatcccagcactttgggaggccaaggtgagaggattgtttaagaccaagagttcaaaatccagcctgggcaacatggtgagactccatctctataacaaatttagaaattacgtaggggctcggacggctcggcaatgtatccatgtattggggaggccgacggaggcggatcacttgaggtcaggaattc

SEQ ID NO: 876 - DNA, 1156 bp, Homo sapiens
agacaaaaagtaaccttcctgaagaggacatgtgattggaagttgtcaattgttgaagcattggtaactccagtctctaacgttttagaaaatcataacaagcggttctgtaccctgtaaagaacagaaacctggaaatctaaggctcaaagacatccaagtaattggtatctgggagatttgggattcaaacccagctctgcttgacttggtgaactactgagttcttcattatgtctgatggagattatgattacctcatcaagtttttagctttgggagactctggtgtagggaagaccagtgtactttaccaatatacagatggtaaatttaactccaaatttatcacaacagtgggcattgatttcaggccaaaaagagtggtgtacagagccagtgggccggatggaccagtaggtagaggccagagaatccacctgcagttatgggacacagcagggcaggagaggtttcgtagcttaacgacagcgttcttcagagatgctatgggttttcttctactttttgatctgacaaatgagcaaagtttcctcaatgtcagaaactggataagccagctacagatgcatgcatattgtgaaaacccagatatagtgctgtgtggaaacaagagtgatctggaggaccagagagtagtgaaagagaaatatggaatcccctactttgaaactagtgctgccaatgggacaaacataagccaagcaattgagatgcttctggacctgataatgaagcgaatggaacggtgtgtggacaagtcctggattcctgaaggagtggtgcgatcaaatggtcatgcctctacggatcagttaagtgaagaaaaggagaaaggggcatgtggctgttgagaagtcaagtaagcgacatagtagttcaggtggcccatgcctgggatcttctctatgattgatacatggcacagtgagagattaatgggcattgtgtacaaattgcttctcaccatccccattagacctacgaataaagcatccggttctaaaattaatttgttgcagctttgtaaatatttctttaagattcagcctgagagttaggagaaatatttcagagccaaaagtgccttatacaaccttagcctattatagtaaatcattcaagggattcagaa

SEQ ID NO: 877 - DNA, 1700 bp, Homo sapiens
gtctagggaatcgaggtgccggctgctccttcctcacaatttgcccagacaggcggtgggtgggaatgcctcacttcagtttgaagagggtccggatccaaaggggttaaaacgagcgacccccgatccccgaccacacttcccgcctccctaaaacgcacaccccgctagccatgggcagccgcgaccacctgttcaaagtgctggtggtgggggacgccgcagtgggcaagacgtcgctggtgcagcgatattcccaggacagcttcagcaaacactacaagtccacggtgggagtggattttgctctgaaggttctccagtggtctgactacgagatagtgcggcttcagctgtgggatattgcagggcaggagcgcttcacctctatgacacgattgtattatcgggatgcctctgcctgtgttattatgtttgacgttaccaatgccactaccttcagcaacagccagaggtggaaacaggacctagacagcaagctcacactacccaatggagagccggtgccctgcctgctcttggccaacaagtgtgatctgtccccttgggcagtgagccgggaccagattgaccggttcagtaaagagaacggtttcacaggttggacagaaacatcagtcaaggagaacaaaaatattaatgaggctatgagagtcctcattgaaaagatgatgagaaattccacagaagatatcatgtctttgtccacccaaggggactacatcaatctacaaaccaagtcctccagctggtcctgctgctagtagtgtttggcttattttccatcccagttctgggaggtcttttaagtctcttccctttggttgcccacctgaccattttattaagtacatttgaattgtctcctgactactgtccagtaaggaggcccattgtcacttagaaaagacacctggaacccatgtgcatttctgcatctcctggattagcctttcacatgttgctggctcacattagtgccagttagtgccttcggtgtaagatcttctcatcagccctcaatttgtgatccggaattttgtgagaaggattagaaatcagcacctgcgttttagagatcataattctcacctacttctgagcttatttttccatttgatattcattgatatcatgacttccaattgagaggaaaatgagatcaaatgtcatttcccaaatttcttgtaggccgttgtttcagattctttctgtcttggaatgtaaacatctgattctggaatgcagaaggaggggtctgggcatctgtggatttttggctactagaagtgtcccagaagtcactgtatttttgaaacttctaacgtcataattaagtttctcttcttggcatcaagaatagtcaagttttttggccgggcatggtggctcatgcctgtaatcccagcacttggggaggccaaggcaggcggatcacatgaggccaggaattcgagaccaacctggtcagcatggcaaaaccccgtctctactaaaagtacaaaaattagccaggcgtgatggcacgtgtctgtaatcccagctactctggagactgaggtgggagaatcgcttgagactgggaggcagaggttgcagtgaaccgagatcatgccaccgcacttcagcctgggtgacagagaaggactccgtctcaaaaaaaaaaaaaaaaaaaaaaa

SEQ ID NO: 878 - DNA, 881 bp, Homo sapiens
cgaggttcgggtcgtggggcggagggaagagcgggcgggcgggaggcgccggcgccagacgcggagggaaggagctacgagtagccgccgagaggccgcggagccagcgacgaccgacccagccgagccgccgccgccgccgcgcccccatggcggccgccaaggacactcatgaggaccatgatacttccactgagaatacagacgagtccaaccatgaccctcagtttgagccaatagtttctcttcctgagcaagaaattaaaacactggaagaagatgaagaggaactttttaaaatgcgggcaaaactgttccgatttgcctctgagaacgatctcccagaatggaaggagcgaggcactggtgacgtcaagctcctgaagcacaaggagaaaggggccatccgcctcctcatgcggagggacaagaccctgaagatctgtgccaaccactacatcacgccgatgatggagctgaagcccaacgcaggtagcgaccgtgcctgggtctggaacacccacgctgacttcgccgacgagtgccccaagccagagctgctggccatccgcttcctgaatgctgagaatgcacagaaattcaaaacaaagtttgaagaatgcaggaaagagatcgaagagagagaaaagaaaggatcaggcaaaaatgatcatgccgaaaaagtggcggaaaagctagaagctctctcggtgaaggaggagaccaaggaggatgctgaggagaagcaataaatcgtcttattttattttcttttcctctctttcctttcctttttttaaaaaattttaccctgcccctctttttcggtttgtttttattctttcatttttacaagggacgttatataaagaactgaactc

SEQ ID NO: 879 - DNA, 5857 bp, Homo sapiens
agtgtccacgtctcctcgctgaaccttaggaatcccttggcaccatgtcctgtgtgcattataaattttcctctaaactcaactatgataccgtcacctttgatgggctccacatctccctctgcgacttaaagaagcagattatggggagagagaagctgaaagctgccgactgcgacctgcagatcaccaatgcgcagacgaaagaagaatatactgatgataatgctctgattcctaagaattcttctgtaattgttagaagaattcctattggaggtgttaaatctacaagcaagacatatgttataagtcgaactgaaccagcgatggcaactacaaaagcaattgatgactcttccgcgtctatttctctggcccagcttacaaagactgccaatctggctgaagccaatgcttctgaagaagataaaattaaagcaatgatgtcgcaatctggccatgaatacgacccaatcaattacatgaagaaacctctaggtccaccacctccatcttacacgtgtttccgttgtggtaaacctggacattatattaagaattgcccaacaaatggggataaaaactttgaatctggtcctaggattaaaaagagcactggaattcccagaagtttcatgatggaagtgaaagatcctaatatgaaaggtgcaatgcttaccaacactggaaaatatgcaataccaactatagatgcagaagcatatgcaattgggaagaaagagaaacctcccttcttaccagaggagccatcttcttcctcagaagaagatgatcctatcccagatgaattgttgtgtctcatctgcaaggatattatgactgatgctgttgtgattccctgctgtggaaacagttactgtgatgaatgtataagaacagcactcctggaatcagatgagcacacatgtccgacgtgtcatcaaaatgatgtttctcctgatgctttaattgccaataaatttttacgacaggctgtaaataacttcaaaaatgaaactggctatacaaaaagactacgaaaacagttacctcctccaccacccccaataccacctccgagaccactgattcagaggaacctacaacctctgatgagatctccgatatcaagacaacaagatcctcttatgattccagtgacatcttcatcaactcacccagctccgtctatatcttcattaacttctaatcagtcttccttggcccctcctgtgtctggaaatccgtcttctgctccagctcctgtacctgatataactgcaacagtatccatatcagttcattcagaaaaatcagatggaccttttcgggattctgataataaaatattgccagctgcagctcttgcatcagagcactcaaagggaacctcctcaattgcaattaccgctcttatggaagagaagggttaccaggtgcctgttcttggaaccccatctttgcttggacagtcattattgcatggacagttgatccccacaactggtccagtaagaataaatactgctcgtccaggtggtggtcgaccaggctgggaacattccaacaaacttggctatctggtttctccaccacaacaaattagaagaggggagaggagctgctacagaagtataaaccgtgggcgacaccacagcgaaagatcacagaggactcaaggcccgtcactaccagcaactccagtctttgtacctgttccaccacctcctttgtatccgcctcctccccatacacttcctctccctccgggtgttcctcctccacagttttctcctcagtttcctcctggccagccaccacccgctgggtatagtgtccctcctccagggtttcctccagctcctgccaatttatcaacaccttgggtatcatcaggagtgcagacagctcattcaaataccatcccaacaacacaagcaccacctttgtccagggaagaattctatagagagcagcgacgactaaaagaagaggaaaagaaaaagtccaagctagatgagtttacaaatgattttgctaaggaattgatggaatacaaaaagattcaaaaggagcgtaggcgctcattttccaggtctaaatctccctatagtggttcttcgtattcaagaagttcatatacttattctaaatcaagatctggttcaacacgttcacgctcttattctcgatcattcagccgctcacattctcgttcctattcacggtcacctccataccccagaagaggcagaggcaagagccgcaattaccgttcacggtctagatctcatggatatcatcgatctaggtcaaggtcacccccttacagacgctatcattcacgatcaagatctcctcaagcgtttaggggacagtctcctaataaacgtaatgtacctcaaggggaaacagaacgtgaatattttaatagatacagagaagttccaccaccatatgacatgaaagcatattatgggagaagtgttgactttagagacccatttgaaaaagaacgctaccgagaatgggagagaaaatatagagagtggtatgaaaaatattataaaggttatgctgctggagcacagcctagaccctcagcaaatagagagaacttttctccagagagatttttgccacttaacatcaggaattctcccttcacaagaggccgcagagaagactatgttggtgggcaaagtcatagaagtcgaaacataggtagcaactatccagaaaagctttcagcaagagatggtcacaatcagaaggataatacaaagtcaaaagagaaggagagtgaaaacgctccaggagatggtaaaggaaataagcataagaaacacagaaaaagaagaaaaggggaggaaagtgagggttttctgaacccagagttattagagacttctaggaaatcaagagaacctacaggtgttgaagaaaataaaacagactcattgtttgttctcccaagtagagatgatgccacacctgttagagatgaaccaatggatgcagaatcaatcacttttaaatcagtgtctgaaaaagacaagagagaaagggataaaccaaaagcaaagggtgataaaaccaaacggaagaatgatggatctgctgtgtccaaaaaagaaaatattgtaaaacctgctaaaggaccccaagaaaaagtagatggagaacgtgagagatctcctcgatctgaacctccaattaaaaaagccaaagaggagactccgaagactgacaatactaaatcatcatcttcctctcagaaggatgaaaaaatcactggaacccccagaaaagctcactctaaatcagcaaaagaacaccaagaaacaaaaccagtcaaagaggaaaaagtgaagaaggactattccaaagatgtcaaatcagaaaagctaacaactaaggaagaaaaggccaagaagcctaatgagaaaaacaaaccacttgataataagggagaaaaaagaaaaagaaaaactgaagaaaaaggcgtagataaagattttgagtcttcttcaatgaaaatctcgaaactagaagtgactgaaatagtgaaaccatcaccaaagcgcaaaatggaacctgatactgaaaaaatggataggacccctgaaaaggacaaaatttctttaagtgcgccagccaaaaaaatcaaactcaacagagaaactgggaagaaaattggaagtacagaaaatatatcaaacacaaaagaaccctctgaaaaattggagtcaacatctagcaaagttaaacaagaaaaagtcaaaggaaaggtcagacgaaaagtgactggaactgaaggatccagctcaactctggtggattacaccagtacgagctcaactggaggcagtcctgtgcggaaatctgaagaaaaaacagatacaaagcgaactgtgattaaaacgatggaagaatataataatgacaataccgcgccagctgaagatgttatcattatgattcaggttcctcaatccaaatgggataaagatgactttgaatctgaagaagaagatgttaaatccacacagcctatatcaagtgtaggaaaacctgctagtgttataaaaaatgttagtacaaagccatcaaatatagtcaagtatcctgagaaagaaagtgagccatccgagaaaattcagaaattcaccaaggacgtgagccatgaaatcatacaacatgaggttaaaagttcaaaaaactctgcatctagtgaaaaagggaaaaccaaagatcgagattattcagtgttggaaaaggagaaccctgaaaagaggaagaacagcactcagccagagaaagagagtaatttggaccgtctgaatgaacaaggaaattttaaaagtctgtctcaatcttccaaagaggctagaacgtcagataaacatgattccactcgtgcttcctcaaataaagacttcactcccaatagagacaaaaaaactgactatgacaccagagagtattcaagttccaaacgtagagatgaaaagaatgaattaacaagacgaaaagactctccttctcggaataaagattctgcatctggacagaaaaataaaccaagggaagagagagatttgcctaaaaaaggaacaggagattccaaaaaaagtaattctagtccctcaagagacagaaaacctcatgatcacaaagccacttatgatactaaacggccaaatgaagagacaaaatctgtagataaaaatccttgtaaggatcgtgagaagcatgtattagaagcaaggaacaataaagagtcaagtggcaataaactactttatatacttaacccaccagagacacaggttgaaaaagagcaaattactgggcaaattgacaagagtactgtcaagcctaaaccccagttaagtcattcctctagactttcctctgacttaactagagaaactgatgaagctgcttttgaaccagactataatgaaagtgacagtgaaagtaatgtttctgtaaaagaagaggaatcttcaggaaacatttctaaggacctgaaagataaaatagtggagaaagcgaaagagagcctggacacagcagcagttgtccaggtgggcataagcaggaatcagagccacagcagccccagcgtcagccccagcagaagccacagtccttctggaagccagacccgaagccacagtagcagtgccagctcagcagaaagtcaggacagcaagaagaagaagaaaaagaaggaaaagaaaaaacacaagaaacataaaaagcataagaagcataagaaacatgcaggcactgaagtggaattggaaaaaagccaaaaacacaaacacaagaaaaagaagtcaaagaagaacaaagataaagagaaggagaaggagaaagatgaccaaaaagtgaaatctgtcactgtgtaaaaagacagattttttaaattgacttaattactaagtcatctgtattaaattttgttataatgtaaagagattcaagccttgtaaataatgacatggaagaccctgtgctgcacttaaaatattgctgcttgattatttgatttttacatcagagctttataacacgaacttttgtacagaattgtgagttgtgaccatgtaacatgagaggttttgctagggcctattatttttaaccaccattaattagttggggtggagtttactgtaatgtgaaattttcacatttgaattttttaattgcctggcaaaagctgatataagttctaaaatatcagcagaatgatttgctgaattcattacatccctgttatgtcactttttgattacaataaaagttttcagtaaacttttcaaaaaaaaaaaaaaaaaaa

SEQ ID NO: 880 - DNA, 1155 bp, Homo sapiens
gtttttccgctgcaggggtgctgaaggggggacgcgggtcggacgcgtccggctgtggaagagagcggcggccgctcacaacatgcacagcctggcgacggctgcgcctgtgcctactacactggcacaagtggatagagaaaagatctatcagtggatcaatgagctgtccagtcctgagactagggaaaatgctttgctggagctaagtaagaagcgagaatctgttcctgaccttgcacccatgctgtggcattcatttggtactattgcagcacttttacaggaaattgtaaatatttatccatctatcaacccacccaccttgacagcacaccagtctaacagagtttgcaatgctctggcattactgcaatgtgtagcatcacatccagaaaccaggtcagcgtttctcgcagcacacatcccactttttttgtacccctttttgcacactgtcagcaaaacacgtccctttgagtatctccggctcaccagccttggagttactggggccctggtgaaaacagatgaacaagaagtaatcaactttttattaacaacagaaattatccctttatgtttgcgaattatggaatctggaagtgaactttctaaaacagttgccacattcatcctccagaagatcttgttagatgacactggtttggcttatatatgtcagacgtatgagcgtttctcccatgttgccatgatcttgggtaagatggtcctgcagctatccaaagagccttctgcccgtctgctgaagcatgtagtgagatgttaccttcgactttcagataaccccaggttttcagatttgactttctgctggtcatcttttcaaagaaaatgaaacgtttaaaagttcatctgataatactgctaccatagttttgttttcactgctcatctcttattaaggtttttaaccataaaactgaagcaatttctgtaaagacacaaattgataacttagtatagaattaaaattcattaagttatcataagtttgatgttatccttgttaatgtactgatttttgaattattttatttgccataatccatatatttctaacatgagtattttgacagtatttaataaatcagaaagctgtctaaaaaaaaaaaaaaaaaaaaaaaaaaaaaa

SEQ ID NO: 881 - DNA, 3637 bp, Homo sapiens
  misc_feature (1762)..(1762): n is a, c, g, or t
agccgaccccgcgccaacagcggcggggtggacctggactccagcggggagtttgccagcatcgagaagatgctggccaccacagacaccaacaagttcagtccgtttctgcagacagcggaggacaacactcaggatgaggtggccggagcccctgccgaccaccatgggcccagtgatgaagagcagggcagtcccccagaagacaagctgctgagggccaagcggaactcgtacaccaactgcctgcagaagatcacctgtccccactgtccccgggttttcccttgggccagctccctacagaggcacatgctcacacacactgacagtcagtcggatgcggagactgcagccgccgcgggcgaagtgctagacctcacctcacgggacagagagcagccgtcggagggcgccactgagctccgccaggtcgcaggggatgcgcctgtggagcaggccacggcggaaacggcctcgcgcgtgcaccgggaagagcacgggcgtggggagagccatgagccggaggaggagcatggcactgaggagagcactggggacgccgacggcggaagaggacgcgtcgagcaaccagagcctggacctggacttcgccaccaagctcatggacttcaagctggcggagggcgacggcgaggcaggcccgggggcgcggcctcgcaggagcagaagctctcctccgacacctgtgggaagagcttcaagttcctgggcaccctgagccgccaccggaaggcgcacggccgccaggagcccaaggacgagaagggagatggcgccagcactgcagaggaggggccccagcccgcccctgaacaggaggagaagccccccgagaccccggcagaggtggtggagtcggccccgggtgccggggaggccccggcggaaaagcccgcggaggagacggagggcccctccgacggggagagcgcggccgagaaaaggtcctcagagaagagcgacgatgacaagaaaccaaagacagactcccccaaaagcgtggccagcaaggcagacaagaggaagaaggtctgcagcgtgtgcaacaagcggttctggtcgctgcaggacctgacccggcacatgcgctcccacacaggggaaaggccatacaaatgtcagacctgcgagcgaaccttcaccttgaagcacagcctggttcgccaccagcggatccaccagaaagccaggcatgccaaacaccacgggaaggacagcgacaaggaagagcggggtgaggaggacagcgagaatgagtccacccacagcggcaacaacgccgtctcagagaacgaggctgagctggctcccaatgccagcaaccacatggctgtcacccggagccggaaggagggcttggccagtgccaccaaggactgcagccacagggaggagaaggtcacggcagggtggccgtctgagcctggccagggtgaccttaacccagagagcccggcggccctggggcaggacctgctggagccgcgcagcaagaggcctgcccacccaatcctggccacagctgatggcgcctcccagctcgtggggatggagtgacagcctcagtccccctcagcacagacaaaagccagcagagcaaagcgtctatcttcatggggtttcctcagtgccctttggctgttgaggagtgagagagagagagagagagagagagagagagagagacaagcaggagcgtggctgctcgctcagtgccatagccttaccgcagcctgcncggaggccacagcccgtgccgattccagtgccttaactacttaccggatccctccatattatcatgggtgttgtatttttccaaaatgacttcttaaacaaaacaaatattataatgaattgtctggagaggacctcttcatttgagcattagcgttattttgtattggtgtgtgtgagcttgttcttgtgaatctgtgatagcaccgtttgttctgtgagctgtaaacagaagtaaaaaacatacccttgggtacccatagccaataactggaaggaaaatgatgtgaatttcatgtaaatgaccagaggaaagatggataagatgataatttcttaataggctttccttttctttgtgcttcatggtggagctgtcatctggtccttggtattacaggatgtggttgatgaaggttccaatatgtttcaggccaaaccagggagattctagcttcagcctcatgtccatttccagtctgtcagcattagacatggtcactgttcaagtttcaagacatccattcttaactatagagaagagttactcccctggcgtcttaacctatggaaaacatgcacggataggatatatttgattgcctcctcttccctttcagtatatgtattattaatattattattattattattattattagttcatcagtttgctgttctctgcagtgagcagaatcaaatgggcaatatttgtcctgggagacctgtgccgcacccaggtccccgtgttaacgtgtgcctgcggttgtggttggcaccctcgggtggtagctcttctactgtaatgagacaagcctttcttctgtcactgcagaatttagaaggggccgtgagcagtcttcccaagcatggtccaggagcagctcagagagggtggagtgaggatgcatgcatccagggaacaggcatcaagaagccagggccgtgcctggagcactgcagagatgactttggagaaagcaaagcagtgacccagtgaccaggcacattactcgtgagcgaaggtattcccagtcttcctgctaagcctaatccaagccttacccagctgtgctactgtcatttgcaaagcaaggaaatactactactggtaataaaactacactagcaagatgtacagataagaaataggtttatatttaccttcctgcgatgtggggttggtgcttgaagataaatgtgactgtttctagtttcttaaatagcccacacccctggatgcaaaaaggcagggttatttttacccatgagcatcctgtgcaggcaatagacttccctcactgtctccgcctgcagggaggagaatgtaccccactgcacctgagctcctggtccctcagccaagacctcaggggtccccagccagcctgctgctggggacccctgtgcttgctgcagtgtatggagcctcttgccttcccctggggaggcacccctgtaccccagcttccttcccctggccttttctggccccagtgctcctcctttacatagacttgttcacacagaaacgtgcacgcccccttttctccgccacttcaccagtttctgaaatccaacctcccagacttcacaggaagatagatattcttgagataatgaaaagtgatatcttcgcatacgaaaggaaaaaaggttgaggtatatatgatttttaactgtattaggggtgtatgaaccagtttaaaaacgaggttttatttactgtagagatgaatgcaaatcagaaccaacgttgatcccttggcctacttagttaaaaccagttcatacatcccttagggtttttattattattattattattattacagttgttattgttgtttttgttgttattattatttgggggccg

SEQ ID NO: 882 - DNA, 213541 bp, Homo sapiens
aagcttccacagcagggaaggggacccaagcaggttgccactgctggctctggtggccagcttttattcccttatttggccctgcccacatgctgctgattgctccattttacagagtgctgattggtgcatttacaatcctttagctagacagaaagtgctgattggtgcatttttacagagtgctgactggtgcatttacaatcctttatctagacacagagcgctgattggtgtgtttttacaaagtgctgattggtgaatttacagtcctttatctagacacagagcactgattggtgcatttttacagagtgctgattggtgctttgacaatcttttagctagacacagagtgctgattggtgtttttttacagagtgctgattggtgcatttacagtcctttagctagacccagagcactaattggtgcatttacaatcctttagctagacccaaaagttctccaagtccccacctgacccagaagcccagttggcttcaactctcaagaccactgacagccagcagcctttctatcaaaaatcctaaccaagtaacccacagatggcccaaatgcattcaatctgtagcagcaactgcttcgctagcagaagaaagtagaaaaataacttagaagaaacctaattgtgagcacacctcaccagttcagagctaccctaaggaagagaaaagcaaaagcgtagcttactaacttaaaaatcttaaagtatggggccattctgtgaggaaaaggtgatttaacattaaccactgaaaattcccttaacccagcagatttcttaacaagggatttaaatcttaattacatacagaggaccgacaagacctaggaggaactccattcaagacaggacaatagatggctcctcccatgtgattgaggaacacacacacacacacacacacataatgggtattcagtaattgatagggaaactcttgtagaagcagagttagaaaaattgcctaataattggtctgctcaaacatgtgagctgtttgtactcagccaagccttaaagtacaaagccaggaaggaaccatctataccaattctaagttagtttagactaaacaaggtcttatagacagcaaaagataatggaaatcccaaacttacaagggtttaaacaaaagtaaaatttgctaaaagttaacggtgtaacatgtattatcctaacttctagtcttgtggccttccttatgtctagtccatagacataaaggaagttccctttggaaaagtggttatcttcaaaatataaataaataaattactctatctcaatcctgactcaaaacattgcctacatcctctctgaaatgaatttgcataagaacagttgtttatgggagtgcatcttgatggggaagctgggttgttatgaaatactcaggaacctagcccagctctagaactcacctctgagtgcaaaggcaatgttgggtaagctggtaaaggaccactagaatccagcagcccatacccctttctttgtggtcaagaaaggtgggaaaacaggtgcaggactgctacattggtgagcataactaatctgataagcagaggtccatgggtggttatgcaccctggaaaggaagaagtattaggactatagaggatgctctaggactaatactcatcagaaaatgactagggtgctgtcatccctatgttcttttttcagatgggaaacgttccccccaaggcaaaaacacccctaagatgtattctggagaattcaggccagtcagagtgtatgtacctttttccctctcagacttgaaacaaattaaaatagacctagctaaattatcagataaccctgatggctacattgatgttttacgagggttgggacaattatttgatctcacatggatagatataatattactgctaaatcagacactaactccaaatgagagaagtgccgccattactgcagcctgagagtttggtgatctctggtatctcagtcaggtcaatgataggatgacaacagaggaaagagaacaattccccacaggccagcaggcagttcccagtgtagaccctcattgggacgcagaatcagaacatggagattggtgctgcagacatttgctaacttgcatgctggaaggactaaggaaaactaggaagaaggctatgaattattcaatgatgtccactataatacaaggaaaggaagaaaatcctactgctcttctggagagacaaagggaggcattgaggaagcatacctctctgtcacctgactctactgaaggctaactaatcttaaaggataagtttatcactcagtcagctgcagacattagaaaaacttcaaaagtctgccttaggcctggagcaaaacttagaaaccctattgaacttggcaacctcagttttttataatagagatcaggagtagcaggtggaatggaacaaacaggattaaaaatgaaaaaaaaacaccactttagtcacagccttcaggcaagtgaactttggaggctctgaaaaaggaaaaggctgggcaaatcaaatgcctaatagggcctgcttccagtgcagtctacaaggacacttttaaaaagattgtctgaatagaaataagccacccccttatccatgccccttatgtcaagggaatgactggaaggcccactgcccgaggggacgaaggtcatctgagtcagaagccactaaccagatgatccagcagcaggactgagggtgcccagggcaaatgccagcccatgccatcaccctccctaggtatgcttgaccattgaggaccagggggttaactgtctcctggacactggcacggccttctcagtcttaccctcctgtcccagacaactgtcctccagatctgtcactatccaaggggtccaagaacagacagtcactagatacttctcccagccactaagttgtgactggggaactttactcttttcacatgtctttctaattatgcctgaaagccccactcctttgttagggagagacatcctagcaaaagcaggggccattatacactagaattaggagaaggaaaaagggtaaatatatatacagactctaagtatgcttacctagtcctccatgcccacacagcaatatggagagaaagggaattcctaacttctgagggaacacctatcaaacatcaggaagccattaggccccaaaattctccttacctctgaatatacttcctccaattcctgcctaaagataattttatggggaagagcatttgcttgtgtctctccaggtgacaatcaggtgcctatgtgggtgcccaccaaacatctgaagatctatcatgagccacagcatatagtggacccaaactgaaggtttgaaaagcctcaatttcctttccctctgccttctgttagaaggtgcctgtttctcattatcagtggcctcctggctacagacacaaaagtttttgcttctgtttcagtagatttactaacatggaggtgagggtatgcttgtgtttttgcaggagataaatgaaccatgtggatgccctcaagatgtgcatgaccatggaatgggagactggagggacacttggattaaaaccttggaccgggttcgcccagtatgagccatgagccagctgaacctgaatgcaaagaaggaatgaagaccgactagagtcatgcatgcttaatggaccaatgcgtcctgactcagctcttttctacctgaatacaagagaccctaatagttaggcaggaatatcatcacctctattcagcatgaagttacagaagatagaccttcatccttctgtaacccctaggattaagggtcctcttgtaaaagggaaaggggagatatgtgggaagcattcaaaccagagtgactccagtttgaataagggctaagaaaaatgaagctggatgaccaactggcaattcaagccttcacagcctgcaattgccttctcaattaaaagaggccaacttttatgctactaattacgatatctagtaataatgatagtaataatgacatttctcttttacaaaaaagagaaagggggcatgttgggaaaaagctgaatattgggaagaaaactgaggcagggcttgcatgtctgacataatgtcctctggaatgtgtctagactttctggctccttgcttctagccttcctagtctcctagatccattgtattcccattatcacaagtagcagaacacgttccttataaatgctaaactatcacagctgttcatcatgcacctgcccttttgacctcctcattctcaccacctgttcctttgttggattaccaataaatagcatgggctcccagagctcaggaactttgcagcctccacagtcgcgatggccccctgctcccactttacttctcaaattgtctttttctcaatcctttgactctgccggacttcattacccccaccacctggtgttgggcctgataaccccaacatttctatgcctttctcatatccaggagagactgagaatctgacaactttaaaagtctgaaaagaaacatttaccatctattctctctgaaggagtcttcatgtacctaacaaggccagctttgctagttaatattcttcttttctctctctcttaacctttcttgccactcaacctgatttaccaacataacctgtttctggccatgctctcagtctgcattctttactgtagcctcaggatggtaatgtaaaccaaaaatgaaattttaagcagccccagccaacagaatggacccctcctctcagtcaattgcattccaaagttatcctaagacaagaggtcaggccatgatggaaatgggtggttggatgtacctcattataccctccttcctttggaattcaggcaaaactaaccagcattaacattaaaacagagaccttaagataatttattatctctgaagcctgcacctggaagcttcatctgcataataaaaacttttatttctacaatcctttatcctaaccctctcttttattgattccaggtctttagataaactcaaccaactgccaatcagaaaatccttctatgacctggaagcctctgctttgagttgttccacctttctggaccaaaccaatatacaccttacgtgtattaattgatgtcttatgtttccctaaaaatataaaaccaagctgtagaccaatcaccttgggcacatgttctcaagatctgctgaggctgtgtcacaggcatgtctttaaccttggcaaaataacctctaaattgattgagacttatctcagtattggtttgtagtatgaaaatttctgtaaatcctcgagaagttggggtttcattctgaaggctcccatgtatacatgttaaataaatttgcaatctttctctcctgttaatcaatctggctcatgtcagtgattttatagtgaacctttaggggtccaagagcctatggccctcacagaatgttggtagtgaggacaaagctctgttttattttattttattttaatcttgcccaaattcctacctaaagggtctagggagtcatgccctacaaaccataaattctcatcagatgggttttatttaaccctttatatcatgacttactttccaatctgactctggcataccattatgagacaaggaagaaaatcaaaatattttacccctgaacatatttctctgccatatcttgaaactgccctgcaaagtcccttgtgggaaaagtccacattctatagagaatcccctttcccatttgttttccttctttcctttccagatccaggagataataaactaagagccaggcactcttttaaatccagtaagaagcattttacaacctgttctctctctctctctctgatgtctggtatctgacagattcctctgcacaataaaacttggtctccacaaacctttatcttaacctgaacttttcctttgatcccaggtcttcagataaacttaaccaattgtcaatgagaaaatgtttaaatttacctatagcccggaagcccccactttgagttgtcctgcctttctgaaccaaaccaatgtatttcttaaatgtatttgattgatgtctcatgcctccctcaaatatacaaaaccaagctgcatcctgaccaccttgggcgtatgttctcaggacctcctgagggctgtgtcacaggccatggtcgctcatatttagctcagaataaatctttaaacatattttacagagattcactctttgtcaacaatagtttggtgcccaaacacgtggggcctcagagaagactcaggaccttgaaggagttgcccaaacttggagctaaggtaccagcagggcccactgaagcctattcttttgagcttctcctctggtggaactggtaagtcctcctgaaccccagacttccctttggttgacagtccttgatttattctgagttggttttctcctaggtagttgttgtttcaggatccttattctagttccgagatgcattctaaatggaattctctcctgcattttctgctaaaatttatcttgatttggttcatctcagtgcatttgcatgaggaactgaagtgtcgttttcatagataaatgagagactgagtttttctgctccaaagagaaaggtcatttgcttctcctagtcaaaaaggtgcccctgggtgatcaggggactcgtgggagtgtctgggagcttgaccccccacaacgtgcagcggccctacagggaaattcccaacaaaaattaatttaaaattgctcatccaggaagtgcatataaaggctgattacccagcattttgagccctctcagaggtcatagacctctggagagagaaacccagacacctaggaggcgggaaggactctgtagtgatacacggtggagtcctgcccacaagcagcatgcactgatccaccacacaaaagccctaggctacagctcagttcctcctcttaagaaaaaaaaaaaaagcaggaaacaaaatctaagaataaggagtaaacaaggagaatgagaatgaccctcttttgggcactctgtaggttttatggcacctccacttgccagagtttatataaaatggaagtaatatggtctttgtgcacatttacattaaggaagaagattcctaaggtcgacctgcagactatagagtacatagcttctattttcttgtctgcctgctttaaagctgctgttacttttctactgagataaaaaccaccatttggatctaaccgctttttgcaagctggcaaagttgtatttatcccatggctaaagtactgaagtaatagctatgggaactttttgtgtgtgtgtgcatgtgtgtgcctatttaaagccttctataattttatgttcaattggcagttgaattaatttccctctagcataccagactttctcttcataccttatgatgtaaattttgctatctgatttcacctgagttgcctttaatatgcaaatttaagacgatttagctgacaactgcctagggtaagatttttttaaatggcaaaaacaaaaagatctttatgagtctatgtgatgtgcttctaccagcatgcctaatacatgtatatatttatgtgtgtgtatacaatattttcatgactaaaaatatatgaagaggctgggcccagtggctcatgcctgcaatcccagcacttcaggaggccgaggtgggcacattacctgaggtcaggacttcaagaccagcttggtcaacacagtgaatccccatctctactaaaagtacaaaaattagctgggcatggtggcacatgcctgcaatcccagctactccagaggctgaggcaggagaactgcttaagcccgggagacggaggttgcagtgagctgagattgtgccactctagcctgcctgactgagcaagactgtctcaaaaaaacaaataaataaaataaaataaaatactatatatatacacacaaacacacatatgaagagctctaattaattggctttaaaaagtgcttaaatcagatactaaacaaaaaaaactagtcaaatgctttttcaagttcatgtgacttaagtaaaatctttactaaataagattttattttagtaagtatctagccagctttaaaattattggtaaaataatatcagcaatgtctttagaattgttagaattttttttgcatctattgatcaaatggtttcatgtttattcccacagaatactataaaatttgccataagtgttataaactataaaatccagcccaagacagagtgatctttgattgtatatgcttatgaaatattgttggcttaaatgaaaacagctaaatactgaattattggtataaatatccttaaaactaaccataagttttattacttaagtaaacacctcaaattcacagctataaaaatcgttaatagaaaaataacttaaaatattggctatcaattttttgcaaataacctaggtaaactactaaattaatcaggtacatgtaatggaataaatgcttgtaaacacacttgtcataatttaggatttaaggttattatttgatattaagtttctgggtaatttccaatttaagaaattttttaacattcttattaaggtaaaatatctttgtctaattaaaaccttatttaagggttatatatgaaacaagggaaaccaggaaataagagcaatataaagaaagttataaaaataaagaggtatttttgacaaaaaaatttaaaaagtcttaaagaaaagatattttatataagaaagaatcttgtatggtaaatttttgtcctaaaataaaaatgatgggattacacaagaaagagggatatttaaaaaaatgataaaggggatatcaccgctgatcccacagaaatacaaactaccgtcagagaatactataaacacctctacacaaataaactagaaaatctagaagaaatggataaactcctggacacaaacaccctcccaagactaaaccaggaagaagttgaatccctgaatagaccaataacaggctctgaaattgaggcaataaataatagcttaccaaccaaaaaaggcccaggaccagatagattcacagccgaattctgccagaggtacaaggaggagctggtaccattccttctgaaactattccaatcaatagaaaaagagggaatcctccctaactctttttatgaggccaacatcatcctgataccaaagcctggcagagacacaaccaaaaaagagaattttagaccaatatccctgatgaacatcgatgtaaaaatgctgaagaaaatactggcaaactgaatccagcaacacatcaaaaagcttatccaccatgatcaggtgggcttcatccctgggatgcaaggctggttcaacatatgcaaatctataaacaaaatccagcatataaacagaaacaaatataaaaaccacatgattatctcaatagatgcagaaaaggcctttgacaaaattcaacagcccctcatgttaaaaactctcaataaattaggtattgatgggacatatctcaaaataataagagctatttatgacaaacccacagcaaatatcatactgaatgggcaaaaactggaagcattccctttgaaaactggcacaagacagggatgccctctcttaccactcctattcaacatagtgttggaagttctggccagggcaatcaggcaggagaaagaaatgaaggctattcaattaggaaaagaggaagtcaaattgaccctgtttgcagatgacatgattgtatatttaaaaaaccccatcgtctcagcccaaaatctccttaagctgataagcaacttcagcaaaatctcaggatacaaaatcaatgtgcaaaaatcacaagcattcttatacaccaataatagacaaacagagagccaaatcatgagtgaactcccattcacaattgcttcaaagagaataaaatacctaggaatccaacttacaagggatgtgaaggacctcttcaaggagaactataaaccactgctcaacaaaataaaagaggacacaaacaaatggaagaacattccatgctcatgagtaggaagaatcaatatcatgaaaatggccatactgcccaaggtaatttatagattcaatgccatccccatcaagctaccaatgactttcttcacagaattgggaaaaactactttaaagttcatatggaaccaaaaaagagcctgcattgtcaaggcaatcctaagccaaaacaacaaaggtggaggcatcgcgctacctgacttcaaacgataccacaaggctacagtaaccaaaacagcatggtactgttaccaaaacagacatatagaccaatggaacagcatacagccctcagaaataataccaaacatctacaaccatctgatctttgacaaatctgacaaaaacaagaaatggggaaaggattccctgtttaataaatggctctgggataactggctagccatatgtagaaagctgaaactggatcccttccccttatacaaaagttaattgaagatggattaaagactgaaatgttagacctaaaaccataaaaaccctagaagaaaacctaggcaataccattcaggacacaggcatgggcaaggacttcatgtctaaaacaccaaaagcaatggcaacaaaaaccaaaatcgacaaatgggatctatttaaactaaagagcttctgcacaaaaaaagaaactaccatcagagtgaacagttaacctacagaatgggagaaaatttttgccatctactcatctgacaaagggctaatatccagaatcttcaaacaactcaaacaaatttacaagaaaacaacaaaaaaccccatcaaaaagtgggcgaaggatatgaacagacatttctcaaaagaagacatttatgcagccaacagacacatgaaaaaatgctcatcatcactggccatcagagaactgcaaatcaaaaccacaatgagataccatctcacaccagttagaatggcgatcattaaaaagtcaggaaacaggtgctagagaggatgtggagaaataggaacacttttacactgttggtgggactgtaaattagttcaatcattgtggaagacagtgtggcaattcctcaaggatctagaactagaaataccatttgacccagcaatcccattactgggtatatacccaaaggattataaatcatgctgctataaagacacatgcacacgtatgtttattgtggcactattcacaatagcaaagacttggaaccaacccaaatgtccaaaaatgatagactggattaagaaaatgtggcacatatacaccatggaatactatgcagccataaaaaatgatgagttcatgtcctttctagggacgtggatgaagctggaaaccatcattctcagcaaactatcacaaggacaaaaaaccaaacactgcatgttctccctcataggtgggaattgaacaatgagaatacatggacacaggaaagggaacatcacacaccagggcctgttgtggggtggggggaggggggagggagcacattaggagatatacctaatgtagatgacgagttaatgggtgcagcacagcaacatggcacatgtatacatatgtaacaaacctgtacgttgtgcacatgtaccctagaacttaaagtataataaaaaataaaataaaataaaataaaaaaagaaagagggatatttaagataaaacagtctgaacgcttgtgaatgaactatgtaagtcataataacattaataaaataaatttttaaaggagttgtgtaatttagttgtctataactaaaaataaatcatgataatctttctagagatgggtctttaatatttttaaaaatgcagtagtacaaaactaattggttaaagcaagattttattacaaatattgtcttattattttattttgttttgttttgtttttgagatggagtctcactctgtcacccaggctggagtgcagtggcatgatctcagctcactgcaacctccagctcctgggttcaagcaattctcctgcctcagcctcctgagtaactgggactataggtaggcaccaccacccctggctaatttttctatttttagtagacatggagtttcatcatattggccaggctggtctcgaactcctgaccttgtgatccgcacacctcagcctcccaaaatgtcagtattacaggcatgagtcactgtgcctggctgacttatttttaatgcaagaagtttttaaatttttaattgtttctttaacattcttcaggttgatatcttaaaagtgctactctttctctgttgaaaaggctttgaaggacggctctttccttcaccttttgttggctcctgtaacttttactagttatataaagtaagggagaaaaattgtttttgaaaacaggcaagtgaagtaacttttgagcatgtcttttattctgcatgcctgttatatctctatatttatatgtgtcatgtggaagtgatatttcacttccaaactacatgaaagagttctaatcaactaactttaaaaaatgttaagtgcctgtcagattggcaaaaactagctcagatgcccttttaatttacataaccttgataatctgtggtaaaaatttaatttggtaaatttaatctcaaaattctccagtaatttaaaaatcttaaagtcatgatttaaccctcgggttttgcaccccaccccaccgagtggaaatttgggtgactaaaaagttaaaataatagaagcacaaaatatgcagcatttgttaacattttataaacacaaagatatcaattctcaaaaaatgtaaatttctttttggttaagaaacatttaagagttgctttataatgaaggatagtaactctcctaactgtcaaactatgaatgttatttatctttccttgtttacttcaaggaagccaatatgatggtactctgaagaccatatgaaactcatttgacatcccgctgggcctggatctgtttcactgcaaatgctctgctgccaaaactatacaagttgctccctctgggcccaggaactatcacggaagaggtgggcatgtaagattgtaagggccagctttgagggataaaattagaacaagaccaaaccctccaaatcaagaagaggttacaaaaaaaaaaaaaaaatgcctaaacagctggtaaaacaagtttagttgtcttctaaactattatgtgtcacttttgcatacatcccaaccacaaacattttctgcttcctataaaattaaaaaatatatatatttactaataggataaagtaccttgtaacaaaccctcctgggtataatactgccagttataagttgtgaagataaatatgtctatacatatatacatattttaaattatttttcagaacaatgcttatattttgagtagctaattgctgtaagtatgtaacagaaactaagcttacagtaactcaacacataaaagttaaaaagaagccagtcttgtaactttgccttttggttctattgttgggtttgtttttttgggtttgtttttttggttttgttttttgttttttgtttttttcacacagagtctctctcttgtcacccaggctggagtgcagcagtgcgatctcagctcactgcaacctctgcctcctgtgttcaagcaattttcctgcctcagcctcctgagtagctgggattacaggtgcccacgaccacgcccagctaacttttatacttttaatagagacagggtttcaccatgttggccaggctggtctcaaactcctgacctcaggtgatccacccacctcggcctcccaaagtgctgggattacaggcataagccactgtgcccaatgtttttttttttattataccttaagttttagggtacatgtgcacaacgtgcaggtttgttacatatggatacatgtgccacgatggtgtgctgcacccattaactcatcatttagcattaggtatatctcctaatgttatccctcccccctcccgccaccccacaacaggctctgatgtgtgatgttccctttcctgtgtccatgtgttctcattgttcaactcccacctatgagggagaacatgcagtgtttggttttttgtccttgtgatagtttgctgagaatgatggtttccagcctcatccatgtccctgcaaacgtcatgaactcatcattttttgtggctgcatagtattccatggtgtatatgtgccacattttcataatccagtctatcatttttggacatttgggttggttccaagtctttgctattgtgaatagtgccacaataaagatacatgtgcatgtgtctttatagcagcatgatttacaatcctttgggtatataaccagtaatgggattgctgggtcaaatggtatttctagttctagatccttgaggaatcatcacactgtcttccaaaatggttgaactaatttacagtcccaccaacagtgtaaaagtgttcctatttctccacatcctctctagcacctgttgtttcctgactttttaatgatcgccattctaactggtgtgagatggtatctcattgtggttttgatttgcagttctctgatggccagtgatgatgagcattttttcatgtgtctgttggctgcataaatgtcttctcttgagaagtgtctgttcatatccttcacccactttttgatggggttgttctttttttttgacttaaaatcatttctagaagtaatcaatgcctgtccacatccattcctatctggcctagaacaattaattggctataagtcttttgacttttaaggtcttcagccatgggcagtcctgccaaggaaaaaatgacggtgcagaattatgacttctcctgtgacaaaaccttttctctcccaaataccagtatatggtgcaatacaaaagtggtgggaagaatagattcgtctatattaacaaggctataagaatttagatattgaggaacaggtgtttcttgcatttaatttacaccctcctcaggatgctatacctatggagacaaattggccggaaaagagattaaatttattaaattccaatttaatgttggtcccgtaatttccaaataagatttatcagagggttgaaataacccttaataagtaaggtaaccacattgtgagtctgatcaaagaatatgatgatgtatgcagtgtttattctggctgaaatattctttctgctctctgatgccacctataaccttggatacccaaatcttcactatctttatgatagacattttcttgtaaatgttatgccagatacagcaaaagggaaaggcacaattaaagactcagatcatgataactcagaacatagatctgatctgggatttttttgtaaaagactaaaccctaagcctgactccatctcaccccttaaactccaggtcttccccccattatccaaaacgctagtgtttaaaactattaccatcaaatcagaggactctaggaacaagctttcctagcactgtgggaccctgccagatggccaaatcagacaactctaggaatgagtcttcctagtgccatgggacctgctgctgtttgttggcctacatgtgcattctatggaatgctttttggccaagagcggggactgaggactaagctctgatttttacaatcttgcccaaattcctatctaaggtgcctggggagtcataccttacaaaccataaattctcatcagatgggttttatttaaccctgtatattgtgacttaactttccaatctgactctggcataacattacgagacaaggaagaaaatcaaaatattgtaccccaaaacatgtttctccgccatatcttgaaattgccctgcaaagtctcttgtgggaaaagtccacattctatagagaatccactttccccttcattttccttccttcctttccatatccaggagataatcaactaagaaccaggcaccccttttaagtccgataagacacattttacaacctttctctctgaagtctgctatctgagagtttcctctgcacaataaaacttggtttccacaatcctttctcttaacctgaacatttcctttgatcccaggtcttcagataaactaatcatcaatgacaaaatgtttaaatttacctataacctgaaagaccccgctttgcgttgtcctgcctttctgaaccaaaccaatgtgtttcttaaatgtatttgattgatgtctcacgcctccctaaaatatataaaaccaagatgcatcctgaccaccttgggcacatgttctcaggacctcctgagggctgtgtcatgggtcatggtcactcatatttagctcagaataaatctctaaaaatattttccagagtttcacttttttcatcaacagtagtagtttcctatgtacagcatgtgatataaagtctcttgtccctttttcccatgaaattttcccaaagaatacaaaaacaatcacaaaataataattagattccctgaagaaaatggagaaaagtgatggaagtttgaaagccagctggatgcatctagcatgaggctcagcccagccagctcttggtgatgaggaaagtggcaccatctagaccacttttccacctcactaccctctcctgatacagacagggtcaagagtgaggataggagggttgtgttcactgaggatctcttcctcattcttttgaagctaaaccaaagtacataaagtgggcagagtctcagatggaatcattagttatgccatgataagatgtgtgccaagtttggaccaaggccatcatgtgaggaatgttccaaaacttggctgtcatatgagctttgaaatacagatggaaacagaatacagccagactgaagcttcatgagtaaaatcaaattataattcagagttagctctgtaagggcaatcattaaactctgatattttaacttttatgtctaaaacatattagctctgatttttgaactagccatttcaatttcagagtccctaaaagatacataaatatccataagtttcaaagagtgtgttttggtttagcttaaaattaattctcaaacatagggagatgcaaaaataaagttgtattaagataacaccacacacccaccagcctggcaaaaattaataagtctgacaataccaaatgttggcaggaacatggaacaatggaaattctcctgccctgcttatataaagaagcataaattggtttggaagatagtgtggtattgtgttgtatcagtgtgacccgcaattcctctccttgaaaaactctacagaaatgcatgcttgtacacaccagggtgcatgtcctaggattctatgtagcattaaacatcaatagcctcaaagcgaaaactacagaaatgtccattaatggtaggactggtataagaaattgtggtattttcataaaataggatgctgcacacaattaagataaactacagcaatatgcaacaacagggacacatcttagaaacacaattattatataataatgtagcattacctgtttaaaattcgaacacatgtaaaataaaattttggttagggatagttccttaggaggtaaattataaaggcaagtaaggaattaacaacataaaggtcaagatagttgtttcctttaagggagatggaagtctctgaggtactggcaatgttatgtttttttgacttggtgagtgggttacacagatattttaatttcaataatttattaatctgtaaatttctgtcttatgcattttctgtacaattgttattttacaactgaaatgtttaaaaaggaatcaacccacaatcatgcaaggctcactgagtttcctttggatctctggatttgctttaactaattaacttttgatcatcatcgccaccaacacttaacacacaaacacacacacactcctcaaagaaccagaagaaaaacagaccatgatgtatcagattccttaaaatcttacccaaagatgttgttacaagccacttctaccatacctggtgaaatcctgctgcagaatcattcgatatatagatgataccccccaaaagtggttaatggggtatttcaacaatgtctggaaagggaagagagaagaaattttatttttacagttaaggttaaactaacagccaattattagcagtctagttctgaccttcccactagaagagcccatttgttaatttcttaatcctttaaatacacacatactgagcatggatttcatacatggtatgcatcaggtactgttggggaaatacaaaaacgcagataacgttccaactcctatggtgagtagccactaataggataaaacaggactcgaatgataaggcagaagtgggtagatgtcataagaaatacttgaagtacaaaagttctgtaggaacacaggagagggaaatactctttctagttgtgtgtcccaggggcttgatggaagaggtggtatttagtcaggacattagcaaatagatatggtgtctacaggcagggagagtgggagtctcttggagatagatgaaataacaagaaatagggtctcaggagctaaagaaacatttcagtcaagtcaaataatatgatttatttagacccactagagaggagcaagaattaaatttaggaagataaggtaagttggagccaggttatttagactctaaaatgtttggtactcatgattaattggctggatgtgttttctttccgagtttcagatcagggtggagatacactaagagagtgaagaacagtaaagagaagagaaagtgggtttgggtatcttaatttaaatcctgttacttaatttgtctgtaattcaatttccttatctgtaaaatgggaacgtccatatattccatttagaatcatgatgaaatataattgtcatttgtggacaaatctagctctacttccagtccctcccttcataaagacccaatcagctttcaatctctagcctctatctctttaatatctcacatttatatacgcttttaaaatttttgtcctactctcacccctggcccactgcccctaccccaacaggtgtctttacatgtctgtgaaagtctcaggcccactccagcaatgtctgtgtcagtaacctcaccccaggcacagtgagttggattgctgacttggtgacagacaattgccttaggctgtgttggtagaagagctgaggcaggactggcttctctgtcatgatgtaaaagagtcttggaacatgtcctgggtccagggcctaaacccccttgtggcctttgggacaccaatctctgtgccaaagggtggaaggctgccctgccgcaccataatctaagcccagggcataaaaccccttgtggcctctggaatgtgcacacacttgttggctactctcccaggctcataaatatgttctccattatctcaggtagcagagcatattacatatgcatcaaagaaaatgctaaaccgtcacagttatgcttgatgcactgctacttttctacccccatgtcctcccatcctcacctctttacccccacatccgcatgtcctcaccacctgcttctttgtttgatcaccaataaatagtgtgggctcccagagcttggggtcttcacagcctccataccagtgttggtcccctggacccaccttatgcactcttaacttgtcttttctgattcctttgactccgccggactttgtagcctccacggccttgtgttgggtctgatcaccccaacattctggaccactcactcagcctctagttgacctggactggttatctgggaagggggaatgtcgccctgaaatgctgtgattgctatgtttgactatgtgcatgtgaagtagcaaaagtgtttctacaaacagaaacaaggaagcacatctatagagaaaagcagaggagacactgaagctgccttaattgctggtatctttctactttctgttttagatctttatcaagctcatattgctcttctcctacagaataatgagctattctagttcccccttccgtgtatttctttttccactaagctacgttgaagtaggcttctgttactggcagccaagggagctctgcttagtaggtaagaattagacatcataggtgtctaaggcctttcccagaaattggcacttagtaggtgttcatcaaatgtgggctctggctattatcatgtaagttgtaatctatgactactcctggtgctttgcagctttcagtaggggtgtggaacggagatcagcagactcttgcaacagatttggcaaggactaagttgacaggggtgggtagagaggaaatagaaggaatgttttgttttactaaattgaatagtatttatttatttatttatttatttatttttggtctaaatgccccctttaaaaggcagagtgggaagatggatacaaagaaaatacccaactgtcttctgtcttcatgagacccatctcacaagtaatgatgcccacaggctctaagcaaagaaatggagaaatatctgccacacaaatgaaaaacagaaaagagcaggagtccttattcttatatcagataaaaacagactttaaaccagcaatgattaggaaggacaaaggagggcattatataatgataaatggttcagttcgacaagaagacttaaccgtcctgaatatatgcacaccaaatgttggaacacctagatttataaggtgagttcttcttgacctataaaaagattttgccaaacaaaaatagtgggggacttcaacaacacactgaaaatgttagacacatgattgagacagaaaactaacaaagaaattatggacttaaactcaacatttgaccaattggacctaatagacatccacagaataatttacctaacaaccacagaatatacattcttcttgttcccacgtggaacatattctaaaattgaccacaggttcagtcataaagcaagtctcaataaattcaaaaaatcaaaatcttaccaaagtacattgttagaccacagtgcaagaaaaacagaaatcaatgtcaacaagatcactgaaaaccatataaaaacatggaaattaaacaattttctcctgaataactcttgggtgaacaagaagtcaaaaaagtttctgaaattaatgaaaatgaaaatagagataccatctaccaaaatcgttgagatgcacctgaagcaatgttagaggaaagtttatagcactaaatgccttcattaagaagttagaaagatcgctaattaagaatctaatatcacttctagaggaactaggaaaaaaaagaacaaccaacaaacaccaaagctatcagaagaaaataaataattaaaattaaagaactgaatgaaattaagatgcaaaagtttatacaaaatatcaatgaaactgagagcttgtttttcaaaagaataaacaatattgatagactgctagctagattaacaaagaaaaaaatgagaagatcaaaataagcccaatcggaaatgacatagatgacactataaatggtcccacagaaatataaaagattctcagagactattatgaacacactgatgcacctgaattagaaaatctacaggaaatggataaattcttgggaacacacagcctctcaacattgaaccagaaagaaagtgaaaacctgaacagacaaattacaagttctgaaattgaatcagtaattactaatcccaaaaagccctggacaagatagaatcacagctgaattctaacagatatacaaagaactggtaccaatccctctgtaactaatccaaaagattaaggagaagggactcctttctaaccattctatgaagccagaatgcttttggcaccaaaatatggcagagatacaatgacaaaagaaaactccaggccaatatccctgataaacgtagatgcaaaaattctcaacaaaatactagtaaactgagtcctgcagcacatcaaaaagttaattcaccatgatcaagtaggctttattcctgggatgcaaggttgggtcaacatatgcagatcaataaacaggattcacctcttaaacagaataaaaaagaaaagccatatgatcctcttagtaggtgcagaaaaagctttcaaaaaatccaatctctcttcatgataaagcccctcaagaaatgaggcattgaaagaacatacctctaaataatagccatctatgacaagcccacagccagcatcacactgaccaggcaaaagctggaaccatttcccatgcgaattggaaaaagtgtaggatgcccactctcaccactcctattcaacatagaattggaagtcctacccaaagcaatcaagcaagagaaagaaataaaagatattcaaatagaaaaaaagtcaaactatctctttttgctgacaatatatgattatatacattaaaaaaccctaaaaactctaccaaagggttcctggaacggataaacaacttcagtaaagttccaggatataaaatcagtgtacaaaaattagcatttccatacaccaacaatgttctagctgacagtcaaatcaagaacacaatctgatttacaactaccactaaaaatgaaatacctaagaatacatctaaccaaggaggtgaaagatggctacaaagaaaactacaaaacactgctgaaagaaatcagagatgacacaaataaatggaaaaagattccatgctcatatattggaagaatcaatattgttaacatgaccatattgcctaaagcaatttatagattcaatgctatgcctattaaaataccaatgtcatttttcacagaatcagaaaaaacgactttaaaactcatatagtaccaaaaagggcttgaatactgaaaagaacaaagctagaggcatcacgttgcccaacttcaaactatgtcataaggctacagtaaccaaaacagcatggtactggtacaaaaacagacaaatacaccagtgaaacacaatagagaagtcacagctatagccatatggtcttcaacaaagtgaacaaaaataagcaatggagaaaggacttcctattccataaatggtgctgggaaaactggctagccatatgtagcagaataaacctgggctcctacctttcgccatatacaaaaattaactcaagatggagtaaggatttaaatataaaacattacactgtaaatatcctagaagaaaatctaggaaatactcttctggatattagctatggcaaagaatttatggctaagtccccaaaaccaattgcatcaaaaccaaaaattaacaagtgggacccaattaaactaaagagcttcagcacagcaaaagaaattatcaagagagtaaacagcttacagagtgggagaaaatattttcaaactatgcatctgacaacatccagaatcaaatatccagattctacaaagaatttaagttatttgtagactcttatatgtgatgtctaattagaactaatatcagaatctacaaagaacacaaatcaacaagtaaaacccaaataatccaattaaaaaatgggcaaagtacataaacagacacttctcaaaagaagacatgcaagcatccaacaaacatatgaaaaaatgctcaatgtcattaatcagagaaatgcaaattaaaaccacagtgagataccatctcacacctatcagaatggtgattattaaaaggtcaaaaacaaatgctggtgaggctttggaaaaaatggaatgcttatatactattgatagaaatgcaaattagtttagccactgtggaaagcaatttgaaaattcctcaacaaacttagaactaccgtttgacccagcaatcccattactgggtatatatccaaaggaaaataaatggttctaccaagaagacacagaggctcatatgttattggcagtgctattcacaatagcaaagacatcaaattgacctaggtgcccatcaatggtggactggtataaagaaaatgtgctacatatacaccatgcaatactacacagccataaagaagaatgaaatcatgtctttggcagcaacatggatgaagctggaggctgttatcctaagtaaatttatgcaggagtaaaaaaccaaacatcatttttttctcacttataagtgggaactaaacattgaatacacatggacataaagttggaaacaatagatgctggggataacaatagacactatgagaagggagagacagggagggggtcgtgggctgaaaaacttattgggtactatatgcactagctgggtcatgagaatattcttactccaaacctcagaatcatgcaatatactcatgtaacgaatctgcacatgcaccctctgaatcaaaaatttaaaagactttttgttttagtcttcaataagatggactaatacaatatctaaattaaaaattattatgaataattcataaaaatagtaagtgggaaatagtaatgcaaatgcttttttggtaaatttgtagaattttaaactttaagcatttactaaggcttaaaatacataaagaccttttgggacactctctatagcagcggaagaattaggcatgaggatgggaagggtggtcagtcttgtttgtggtgctttaagtctcaggtgcagaatgtggtacagaaaataatgatggtgacacaggaggaggcattgatatagaggtaggtaatgagatatgggaagtgcagtttgatgttctggaggaatgatcagatgggctttaccaactagcaggttggaaatgttttgctagcctgggagaatcagcttggaccgagaagactagaccctaggtacagtcctgacagccacctgcattgatgtgcttgctgagaaaaatggaggtgaaggaaattgcttagaaagaagaacagtaagggcagaccactggagcactgcagtattcaggagcaggctaggtgaagcagaggtggctgcagcaaatggaggatgttctttggtgaagtttggtattaaggtggaaaagatgggttgacccagtgtgtagcaggttcaaaggaaggcattttaggataagtacactgaatatgtttacggactgagggtgtaaaactagcgaaaagtgagagactgaaaatacaggagaaaatgcatagtagattaaagattaataaagaaatgctgtttatccaaggccaggagacagaactctgcagtggttgtgcagagcgggtggattttgagaggtggagggcaaggtctgcctctgagagggaaagcaagggtgtgagtggagacataaagaaaatgttggggtgaagggacatagacagaaagaattcatgcaggtgacttgaattgtcatcatgatgtactcatcataacaatagcagcagcagctcccacagatagagtgttttctatgtgctaatgtcagggttaagtactttacacatatcgcctctatcatctcattaatattacctaagactttatgaggtagtaattattaaaagacctattttgcagataaggaaactgatgctcagagtggtatgtaacctgctagttaatttcaaaggtgggataagaagctagatctgtcatattccaagggctgtttttaaacattttatcatattgagtaagaaaacacacacacacacacacacacacacacacacacacacacaccccagctgcttggccctggcagcatcagggtccaggatctgggagacttggacttgtgcttgctttaatttttcaaaatgcacatcctgggtcccaagtctacaaagactgatctacaggtctgaaggatcgcccagtaatacacattttcttcaaggtcacattttgatgtgactcaggtatagtgactcagactcagtgcatcacactttgagaagcccaggctcaggatcatcttaggctcatgggcttctttgcttaataaaatatttttttagcaaggtccaggaaacatggatttttttctggaattttgctgataggggaaggtgagtcttcttacctgtatgatgaccttggtgtcaaactgtggcagatggtggataaagactgtacaacccgctgtccatggttctaccagggtccaaatggtagccacaatccatcctgagtccgacaggcaccaggagacatcagatgtcttcaggctccgtaatttcctactaactccaaaatgcagtggcctcagctgtgtgatcatggctgatgtgatgaagggctgtgcactctggtttttagctacgaacccacctttctcactctcagttcatgtgatttgtgtggggctccataccaccctcaggccaggtctcaaaggtgtactgccaaatatttcccaattacgtacaactgaaactggttcaatcatgctacctctcttgaactgattctcctccagtgttctctgtaaccagacatgtcatccctatccatgaaactgtccaagccccaaactttggcatcaaccttgacctcctcccatctcccatgtttaaccagcagatctggtccactctatttcctgaaatctcaactgtgttaatttccatcatatgtctagtacctgatccatgccactactagcttgcacctggattagactaggagcctttaactggtcttccctaactctattctaattttctccaatccatcctgcatcctgcagccatgatgatcttatcaaaatacaaatttgatcagatctcctcctccctaaaaaactttcaatatctccccgttgttttcctaataaagtccaaaatctactacaaggtctgcaaatccctgcacggtctgagtcctgctcacttttccaattgttcccattggtccttcaccctacaccctgagcaccagatattcccaagtctctgtagttctatgaatactactttttatatctttgtgtctttgcacatattattccacctgcacagaagctctcccttctctcacctccattcctccctgggttttgctactcaactgtcatcattagtgtaaatacccactgcccctcttcgggttaatacaaaaagacatctgtgctccatattctgtttaatatgttaatacattaaaaaatataaagaatttggtccattctgaatattactagttggagatgagaaggcgtagagaaggagaggtttggtttgcaggtgattaaataattaacccaaggatagagctttgccctcttagaggtgatggcttggcatagcttggttccagatattttcttccctagaagtgaataattgaggaaccctaagtctgatttgcccataataggggagaggtgaggctctgtcatctcaggtcaccctgctagaatattctgtctttccctacaaaattatggaaccactgtcaggcttgtcatgtgtgtggcatctggaatgtctactgtctctacccacatttcctccacatctcctatgaagatgctctggtaaaacctaaatgtgcctcctttgtcactctcaggcctctgtcagcaaacatttaggattcccagccttcacctctcagaccctgagaggtctgaacaaaagagagtggaagggaaaaggagtatgtagtcacttctacttccagttcctttcccaagacacacacacacacacacacacacacacacacacacacaaactttgcccacatctgggtccagcctctatgtcggtgccctctttcctaccttcctgggaaggagggttgtaaggccaacccatgggagtgttttgccatcttggggaagcctgtggtcccactggtgaagaagatgaccattgggtccaaggtctttgacttaacacaggtgtgttctggggatgctgatctgcaaaggggttcaagacaaaaggaaaaaagtcatgattgctgtttcttcatcttctgggaatgcaaaagaaacataaggcacggacaggaaactgggagtttgcaacactagaggaaaactggctctcccggagttaggcatcacactgacttgatgggtgattcggacatgtggaccagcatttttttatttgaaaaattagtaaaatacaatgaatcttaagtcatttaatcttaagtaatttaagtaatgaatcttaagtaatttaatgaattcattaagtaatctaatgaacatttgaatagcacttgctatgttccaggcaatgctctcaatgagttacaaatatgaaccattcagtactcagagcaaccctaggagatgagtactactctaatcatgcccattttgcaggtaaggaaactgagactcagagaggttaggtaatttgcttggtaatatacagctagcaaatggcagagccaggattcaaactcagtcggcatcctagtctgtgcccttaaccagactgctaagcttgttttttaaaattaaactctgtgaccttggtgatgaggggtggggaagagaaagagagaaagggggagagtaaaaaaaatatatttagttgggcatgctggtgggcgcttatactcccagctactcgggaggctgagccaggagattagttgtgaacctgggaggctgagcttgcagtgagccgagatcaaaccactacactccagcctgggtgacagagcaaaactccatctcaaaaaaaaaaaaaaaaaaaaaaaatatatatatatatatatatatatataaaacatatttatatattatatatcatatattaaatttatatataaaattatatataaatatataaaatatatacttttatgtcatatataatatatacttacatgtcatatataaatataattataggatatataatttatatataagtatatataatatatatcatatagtatatattgtatataatttatatataagtatatatatacatatacatgtatatgtaagtatatgtaagttatatataatatttatgcttatatataaattatgcttatatataaattatgtacaaaatatgtataatatataatatatattatataatatataaaaatataaatatataatatatgtaatatataatatataaatataaatatatataatatataataaatataaatatatataaaacatattacatataaatatataaaaacatttatatattatatctcatatataaaatttatatataaaattatacataaatatataaaatatatacttatatgtcatatattatatacacttacatgtcatatatacatataattatatgatatatatacttatatataaattatacttatatataaatttgcatattatatatatattatatataaaattactgcgatcaatgtacctctgccctagcatgagcttgagatggcagataagatctgtggttccctcagtctctcttgtttctcaggagcttcccctggactgagagggccttgggcctactacaattgtaaatgcaaggcttctatggtgttcaaagcaactgcaaataatcccaacacgagaggaaacactaggtctgctggtcttgctgtgaaatggtatcatactgactttgggaaattcgagggatttttcaagagtactctgttttaattaaattctctgacattagactacagtataagatgtgactttgctgtaatgtttgccttttggggttgaaataaagagctttaaaaactcaagtattactccaagaaaacaaacccagcatggtttgtgtgtataatgtgagacatgactgaaggcttacagaatcagagttttggaggcagaaggggcctttcttatctccagccttccttcactttgcccccaggtgtctctgaaggcacccagtccctgggagatggaaagagtttgctcccaaagctacctataagccatagttggcaattccatttttcttggggtcttaagttttaccttaaaaattcattttaacctttcattcaactacttcatatatttttaatagaaaaataagactttaggtttcccacctacaaggaatatgtaacacaataaccccctgactttacaaatctcctttgcacagtcccaggggtgagtatattttaatgagaggaacatggaaggttgacttgctgaaaaatgtgaaattttacagataaagcaactgagatcaagagagggcaaggaactaggtcagggtcacatagcaaaacagtgacataagtgaggtttctgacaactgacttgatgaccttcctaccactggctgcttgtctctcaccacttgggagtgaatggcattcttctacctgtggaacaggaattaaaagaaattaaagaatgtgtaagcaaaaactcagttgtatgtaagaaaacccagttgccccagaggaagagaaagaggtggagtcctttaaaaattaactgcctgtttctctgtctgtggctagtgagccttatctctccctttcccaggcattgtgaagaccctgtttctctagctgtgcagctgcaaggtcactagacagataaacccaagttgcaaaacatgtttttccttgaaaagtaagaaatgatgtaatgcatgtctcaattgaataactgtctttgtttctcacttctgtaatatgcttccccctgaacagatctctccctcccccctctccacccccaaaatgcttaaaaggtaacctgactctttgttctgggctcagtcctttggatattaatctgactgggttggctggtgcacctaaataatacatatatcctcctcaaccccatcggtctctctgattcctaaatcatccccaaacatttctggtggcccatatggggattggagataacagatttactgtctcctttgcccatgggactagggccctggggctgtggaagacctggcatccaaggcatgccatgggggagtttcacccggatggagactggctctccccgcatcctgcccagcagtgcaactgaacctgagatggggctgcaggatgacaccagcacttcaggaaccgcggtaaggagaaagggcccaaggtaggaaagcccatcccatagggatgaaggtgagcttgatcacctcccagggaccaaccactcatccaacccagagtggctgggggtggcaggagtggcccgccaatttggatgaacctcgtgtccccctaacaaagtgaaagtggttcactggtggagaaaatgggccgatacagcggcaagtgcagcaaggaagagtttgctggcagaatggtaagagtggcttgccaccccaactgggagtgtgtgggtgtgtgcggacctacccaggacaccagagaggttcgtttcctctgatgaagagtcctggggtagaagtggtgtgtgtatgtgtgtgaatgtgggaatctaactaggctcacccgggacacgagagagggttgttttgtccgatgaggagtcctgaggcaagggaggtgtgtgaaagtgtgtgaaagagacggtctcaggagaggccaatgcggggagtaatgtggggaggcacagatcccttagcgcaggctgtgtgctcccaggcgagtgtgggggaaatcagtcctaggatgttgcatatggctgataggttgagcttcacagctgcagcagtctgtggcagggaaaggcacgttcctggctaagcagcgtctgaaactcctgtaataggacccagtctggtggaccttagagtgaaagtgcacctcaagggaggaaatgggaggaaaagcatggaaaccaactccttttggagtgcatgataaagaatttttaaaaaggatttagagctgattatgggatgaaactggatgttcaaaagttaaggacatactgtgaattagaatagccctcttttagtgatggatggctgaccaatggcactataggtaaattggctgtgtgttttaaggtagtgactagccctggaagacagccagggcattcagacctagtctttatattgattcatggctaaatgaatgcagccctgcctagcagtttattgtagaacgttcacagctcacacccagagaaaccagctgcgctggcggctacggagttaaaggtaaagtcacagaggcttgtagcaccaaaagtgaaaagtgaaagccaaaagtaaaagtaaaaatcagctgccctggcaactacggagacaaaagaaaagtctcaggaaagagaaaaccagttttgcaagaaccacaggagggaatagagacccctcctccctacattccaatctacctccctttaccaaggctaactgcccctaaggaattaagttcaaagagatacaggctcccagtctcacctgagaaggagaaattagagctccaggaagttaaagtgaaaggctggaaaagtcagggagggtgtctcaggtctggtcacgcccaagttatgcttacgcctcttaagaggacaagaggacacccactaggacccagatgatgcagtccagcttcagcacctacaaaagtgccaagaagcccttctgcaaaggctaaaggctggtaaaagaaaaaggcaaccaatataaaaaatctcagaggtgctccagggtgcagataaaagcaccagccagttttaagaaagactttttgaggcattttggttgtacactctgtttaaccctaaggctgctgaaaatcagtgcatggtggacacagcatttgtaaggcaggcccaaggagatatcaggcacaaattgcagaagttagaagctccgtaggcgtgaatgcaactcagcttattaaagtggttacaaggtgtacattaactgagttcaggaggcagagaagaaagctgatcagaggcttaacaaaggctaatttactagcagcagcccttatgggaagagaagctggctttgcaaggaggcatggtcgtgggcgtgaacacagtcatggaaaaggctggtttggacaggagtttgaaagctggccaaggctagagagagattaatgtgcacggtgcaaaaggaaatgacactagaagaataaatgccccaaaaaataaataaataaaataaggagaatggtcaaggccatggtataaaaaaaaaccctccagccaagggctactgcacccaggagaaacccaagactccctgcacctgctgtgaaaggcaggacataaagtgtcagaaaaaagctcaaatctgctctaaaagtctccagtatttaagcctttatataagccaagaggaaagatggcttagtagtaaacaaaagcaatctgtttgtgcacttcctactccaaccacctggtgtcaaataagagagttcctaagggcagcaaggttctgctgcatttagatcccaaatttctagcttatggctaagccacaaagagaaggaaagaaagagcccctcctctaggaggctaaccaggagaagacttttaaagaaattaaaaaaaaaaaaaaagccttgactcaggccccagctttaggactgccagatctaactaactaagcttatcttcttgtatgcccataagtgaaagggaggccatgaaggttctaactcaagccataaggtcatggcatcacccagtgacatacttatccaggcaattagattctgtggcacttcactggcctccttgttttaaagcaatagctgccactgccctactggctcaataagctaacaaactaactttagagactgtgaataccctaaacccggctaccttgctcctcatcaagtcagtaccaggagacccccttcattgctgtgtaaatgtgatagatgaagtgttctcaagccagagagatttgacagataggccccttggggagccagacatagaatattttactgatggaagcagtttcatacgaaagggaatctgctgagctgggtatgcagtggtgactttggactcagtagtagaggtgcagtctttgcctacagaaacttctgcttagaaagcagagctaatagctctgacaagagctctctggctagcaaaagaccaaaagacaaatatttacacagattccaaatatgcttctgacactttccatgttcatgaggctatttacaaagaaaaaaaaggcttttaactgctgaaagtaaagaaataaagtacaaggaagaaattctacagctcttaaatgctgtataggccttaaaagatgtggcagagatgcactgcaaggggcaccataaaggaagaatactaaaggctaaaataaataaataaataaataaataaataaatgagacaaagaggcaaagcaggacaaccccaccttctaaagaagaagccttagctatgcctctcctcccagagattccccttctgtagatcccaagctacactccaaatgaaagggcttgttttgcccagaaaaatatcaactacattgaagaaggatagtaaaaattttccagtgggaggctagccatccctgaaacggtggcccccagatttgtaaaacagttccaccaaggaactgacctgaaaaaaaaacacacaaaaaaacagcactaaagacattattaaggcatcatttctatgtgccatggctcactgctattactcaagccatttgtaaatgaacaatatttaacttgtgttcagaacaatccatgacaagggcttactccacccccaggagttcaggaaacagaagccatgccatgtgaaaaactgcttatgaacttcaccgaattaccctgtgatgggggctatcagtacatgttggtgttcaccttttcaggataagtcaaggccttcctcaccgggacagagaaggaactagaggtgaccaaagtgttgttaaaagacattattcccagatttggactgcctctaactctaagatctcacaatggaccaacatttgtggctgaaatagttcaggacttaacttgactattaaaaataaaatggaaataacatatagcctacagactgcagagctcaggtaaagcgaagagcatgaaccagacactaaaacaactgctgaagaaattgtgtcaagaaactcatcaaaggtaggatcaggtcttgcccatggtcctcctccaagtcaggtgcacctccaccaagcaaactgggtattccccctctgagattttgttcagccggccaccccccatcatctgtagactagaagaagtaactttaagaaggcaaatgcagactttaagtatggccatgcaaaaatgcatggctaggtatagaaaaatgcctataagtctaacagacccagtacaccctttcaaacctaaggattttctttaagttaaaaaatggaatccaaccactctaggacccatacaggataggcctcatattgtaatcatgtctacttctactgctgttaaagttgcaggtgtcacaccttggattcaccatagctggctgaaactagcagcagcagtgactcccgactatgaccagtggattaaccaacaagaccctgattgccccacccgaatagacctacggcgaatcccaaccaccagtaagaaggacaactgccctgctctgaccacactggaggctggtcagtctacacatggctgaagcttgaagatcttgcaagctctgctctagtcacatcctggaagctgactagtctacacacagccgaagctaagaggaccatctctagataagtaaatgtagataaaatttataagcctagttataattgttctgttgttacattattactgcaaatgctgcaaatgtccatgcccagaggaaggtttgccattcctatgtgtagtgtaagcatgtttctattacatacactaatgttgttaccatttctgcctatactagaaggggagaaatctctagaaggatgcccacactgtgtacatactacctgggtaaggaataccatagttaaaactctactgtaccatacctacagtacaggaaccaagttaggaacctgcacatacaaccagaccacctattcggtctgtgacccaggaaataatcagctatatgtatgttatgaccctaagctcttaccctatgaattctggtttgaaatacatattaaatcagagggagaaaaagaaggagagttatagctcgaacaaaagaagcccctccctcctgtaaagggcctatttccttgtactttgatgcctgctatgctgcatatgttcacaatcctaaaaaaaaacagaagcagtctgcaatggtgtaacacaagagaggcttagcaggagcagccctaagcatctgtacaaagaaccacaaatcggatgcccagactgtaacattcagtggtccacactaacacaactccaatatttatattcaggaaggagtgctctgctaagtagtatgttaaccaaaccaaactgtaagacaagaacatgcaatcctttacattttactatcttaaagccagagatacctttctggtctacaggacagacagcactataacgacttgatagactaggagcaggccttggagttccactactaattgtcaaaaagactaaaaggactcaaatgcatccaaccccgcaattctgggtccataatcattctataagcatttggataagccagtgcctgagcttcccccaccaaccaaaaacttatttgctcaactagctgaaaacatagctggcagcttaggaatttcctcatgctatgtacgtggaggaactaatatggggaaccagtggccatgggaggcaaaggaattaatgccacaagataacttcacttcgcttaaccctgccagtgaaccaacagcctcagccagtgtttggttgttaaaaacctccataattggaaagtaccgtatcgcccgttggggaaaggctttcacagaggcagtaggagaaataacctgcctagggcaacagtattatgatgagactaaaaacaaaactctatggagaagcacccagaattactcctacttaccagatccaaatcctttatctccattctctaccctaagccacacttggcatcaactagaggttccaaatgcttcgaaagcaccctctggcctatattggatctgtggagcatgggcatattggcaactgccagctaaatggacaggagcatgtgtgtagtaacaatcaagccattcttctttctaattcctctaaagcaaggggaactcttatggtatccagttgatgatgaaaataaaagaagaactagaagagcataatcacaaaaatagacacaaatgtcaaaaaggatgtggacataggagactggaaagataatgaatggcctcctgaaagaataattaaatattattggccagctacctgggtgcaagatgggtcatggggttaccacaccccaatctatatgctcaactgcatcataaggttgcaggcagtctttgaaattataaccaatgaaacatcaagggcactagatttattggcaatacaagcaacacaaatgagaaatgctatatattgaaatagattggcattagattatcacttagcctctgaaggaagagtatgtggaaaatttaatttaaccaaccgttgcctagaaattgctaataatggccgggttgtcatggaaatcagagctagaatgcacaagttggcccatgttccaattcagacttggtcctaatggtccctggattctttgtttggaggatggttctcaacctttggaggattcaaaaccctcactggtgggtttttgtttattcttggcatctgcctcatcctcccttaccttttacccctgtttattaggaggattcagtcaactatagaggcagtaataactcaacacactaccgcacagttgatggcattaaccaaatatcagccactgccagtagaagaagctcagctctgtgaagaggtggcaaatagtggtgctttctattaacacctttgttataaaaagcaacaaaggggggaaatggaacaggaattaaaagaaattaaagaatgcataagcaaaaactcaattgtatgtagggaaacccaattcctcctgaggaagagaaagaggtggagtcctttaaaaattcactgcctgtttttccgtctgtagctagtgagccttatctctccctttcccaggcattgtgaagaccctgtttctccagctgtgcagctgcatggtcactagacagataaactcaagttgtaaaacatgtttttccttgaaaagtaagaaatgatgtaatacatgtctcaactgaataactgtctttgtttctcacttctgtagtaagcttccccctgcacagatctcccctctcaccccatgaaatgcttaaaaggtaacctgactctttgttcagggctcagtcctttggatgttaatctgactgggctggtgcacctaaataataaatacatcctcctcaaccccactggtctctctgattcctaaattatcccacaacaactgtactcagagattatattcatcagaccagagactcacttaaccagcgatcggaagtccagccacccttcacggctgtgatcagacaccaggagcttggttttcagagaggggcactgagaagctatggagtccacctctgaggcaagggcatctatggtcacaatgcccttggctttagacaactgtagtcgatagagaatgtctttggccttcaacaggatggtcgcaggaatgaagatgatccctggggatgagaaaggaactgattgttttggtttctttttcacaaccatgggctttagacttggcttgtctgcatcgaaataccctaacttcttgttatgtaaagtacaggccacagaacaacagcagcagcactatccaggatgcagaatctcacaccctgtttcaaacctacagaatcagaatctgcatcttaacaagttttccaagtgattcttttgcactaaaatttgtaagccctgccctaatcttttctactgtaaatggatctagccaaaaaatgggtggacactgctttacacacatttacacaggatctggaagtatagatgtaaacagaacagtgtctctgacatcaagaatagctgcatctctcccccatctttcccttccttttcccctttctgtcattccttggatgtcatcttgaatgtcccctctttccttcattctgtatttcaccacattgtcctttgagttttttgcattcccttctatctccattgccaacagtgagctcaagcctttgtgtttccttctggattctcatccctccaccagttttgaatcttcctgctacccatcttccatattattatttgcttagttccataaacattgacttttttttcctctgaatttctttttttcttttatttatttatttttttttaaggtggagtctccccctgtcacccaggctggagtgcagtggtgtgatctgagctcactgcaacctcagcctcctgggttcaagcaattgtcctgtctcagcctctccagcagctgggattaaaggtgtccaccaccatgcccagctattttttattattattattatttttagtagagataggttttcaccaggttggccaggatggtcttggacttctgaccacaagtgatctgtctgccttagcctcccaaagtgctgggattacagctgtgagccaccatgcctggcctccctacatttcttctctgcactaacacctgtaccctctctccaggaaaacaccacacttctcgtcctgactttgaagatgctgctttctttccatctttctcccctacaccttattttctatttcaaaatggccatgcctcaccccatgcttggaatgtccttcctttgtttctaatcctctttaattcttcttagcccagagggctcagctcaagtcttttttttttttttttgagagtcttgccaccacgcctggctaattctttctttctttctctctttctctctctttctttctttctttctttctttctttttgtattttagtagagatggggtttcaccatgttggccaggatggtctcgatctcctgacctcatgatccacccacctcagcctcccaaagtgctggtattataggcctaagccaccacccaggccaagtcttagatttcccatggaccatcttataggtctacagatgacatggcttttcatctctatactccttccaccagttttattacttcttgatttcacatgatctggctgaatgaatcacctattttatttgtgagagaatatgagacggagagagagaaaatatgatcaagagtatggcagagtgctgtacacatgataaaatgagagaagtgattcaaaaaagaatctgtgagtcactgattctaatctatatagacaaaaaataagtcatcaaaaggggaagggaaatctctacataagaattctaactaataaatgaaactgacagaaatagaaaatttccatgtaaaaccaacatggtaatattcaattcggtaaagaatcatcactaggtactcaaaccataatgtgaaagaatgttagggaataggaatattcacacaatcgcttaaggatcacacaatgaattatttattaattacaaggaaaaattgtgcctttgtaaaggataaaggttttctgtgaaaaccaccttgcttaagtgataaaacagtataactgaagagggaacaaactgacttcagaatataccccctgatgtgatgcacagaggaagacacaactttgtccttgcaattctcctgcctaacgtgtctaatctgaatataatcacaaagaaagagtcagaaatacaaatttggagatatattctacaatacaacttgcattcttcaaaaatgtcactgtcatgcagaaaaggctgtggaatattttggatcttatcagatgcctgcttttgtgtttatgagtgtttacctggtgttcataggtgtcacaatgcccactagtgattcttaaataattcagtaagaaagggagagaaagagagagggagagagtgctcaaatatggaaaaacattatcaatgaatctttaaaaaagtaagactctctgaggctgtgcaagagaaagtgtatgtgtgtttgtgtgtgtgtgtgtatgagacaaagtttggcactgcacttgagagtgtatgaatgtgagagtgtgagggagagaataagagaatttgtgagggagtatgagaaagacaaagactgtgaagaagaaaggaggtacagagaagagaaattgttttgtctctaattaaactgataattcccacagggcaggaagccttgctttgtggtcccagcacagaaactggggcgaaggcttcaaagctgtgtcagtgccaggctgggtgcacagcacctaatatctcaggacccattggttctagaacagccccgaggtccaccaggtccctcttgcatcactgacctgttcgcatgcagcccacagccaccagccaccactcaggaactcgaggcagcatcaaggccagatggtctccctgttgtaggccacaggtctgtgtgaagacgttggctacacggcgggttaggtctcccatctctctgaagctccactttacttcatccccttggccattcacccaccaaaaagctggatttggacctctcttgccctcctggtcaagaccatatattatgtgttattttctgcttcaaagaaaaagggcacttagtaaactaatccacagccatagtcacgttccaatgtgaacacagcttaaggactgagatcccattttaaaacatttatacagccaggcgcagtggctcatgcttgtaattccagtactttaggaggtggaggcaggttgatcatgaggtcaggagttcgagaccagcctgaccaacatggtgaaaccctgtctctactaaaaatttaaaaattagctgggcatggtggtgcatgcctgtaatctcagctattcaggaggctgaggtaggagaattgcttgaacccaggaggcagaggttgcagtgagccaagattgcaccattgcactccagcctggatgacacagtgagactccgtctcaaaaaaaaaaaacaaaaaaaaaaaaaacaaaaaacttatagcatcaggagaggtttaggggtggagcgggacttctggcctactgtagccaccctgcctcaagccacataagaccataaacagcctttatgcttcctattgaagatttaaaactccattccaccacatgcctgccttaattccatatggactgtgcattcttctctgtgccttagtttctcctcaataaaatgctgacaataattattacctagaaagtagcaaagtttaaataagttatttacataaagcatgtaagagtgcctgtcacatagtaaatgctcaataaatattattattatcacaataaaacaaaacaaaagaggcttacttaattgctaaatttttgaaaaaaatttttttaattaagttactcttagaggtgagggcagtaacaaagcagactaggaagctccaggcccttttttgcctcatagaaacagcaagattctacctacagaaacaacagatggactgaaatagcttcatgggaggtctagaaaccagccaaggatctgcagaaaaccaaacaaatgcccccagtcatgaaaaagccatactcaattcccacttacacaggcaggggaacaacacacactggggccagtctgacgggtcaggggccatgggagggagagcattaggacaaatagctaatgcatgcggggtttaaaacctagatgaccagttgataggtgcagaaaaccaccatgacacgcatatacctacataacaaacctacatgttctgcacttgtatcccggaacttaaagtaaaataaaaataaataaataaaagctaaatatagagccaggcgaggtggcacacacctgtggtcccagctacttgggaggctgaggcaggaggatagcctgagcccagtttcaggctacagtgattgtgccactgcattccagcctgggagacagaatgagaccctgtctcaaaaaagaaaaaaaaaaagtttaactatggaaagtgattaacatgttaattggtatgactgcagtagtatatgtacaagaagacatcatgttgtacaccttaaatacgtatgattaaaaatttaaaaaggaaaaaaatgaaaaagccatactcaaaatggtagaaaattttgtgattttttttttttttttttggtcaccattgcccccatctctttctggtgtggtgcggtgcagtcaagaggaagccccccaactcccacctcttctctcaggactgaaggaaaggagtgaaacttgtttacaatgttctggcttgtccaagggttgcggagggactggcttctgtcttgcctgacttgcaggtcagatagaaaccatggcataatttgaatatgatgttgggggtctctgaaagcagtggtgggtaacaggctgtgcaaaaacatcagacctgcaggcacgtaggggaaagagaaatacaataaaacatgtaagaccctgaagagaagcaaggaagagacttttagggaaattaagaaattaaaacagccatttatacgggaaaattagcgaggtggggcgggatgcacacacagaggccaaggaaagataaatgctagaaaaggcctgagaaggcctaaagccttcacactatgaagattagtgaaggtctacccctgcatgcagctgctcttcaagactgagagaggggggctgcttttttcaaatgcctaactttcaacataaaaacataaagcacacaaaggagcaggaaaacatggctcattcaagggagcaaaataaatctccagaaacaaaccctaaataaacacaggattcagctactaggcaaagattttaaatcaattgtcttaaatatgctcaaagagctaaaggaaaccacagatccacacctaaaggaaattagaaaaactatatatgaacaaaataacaataccaacaaaaagatagaaactatatattaaaaaagaacccggccaggcacggtggctcatgcctgtaaacccagcactttgggaggccgaggctaccggatcacttgaggtcaggagtttgagaccagcctggccaacacggcaaaaccccatctctattaaaagtacaaaagataagccaggcatagttgcatgcacctgtaatcccagctactcaggaggctgaggcaggagaattgcttgaacccaggaggtggagattgcagtgagctgagatcgtgccactgcgctccagcctgggagactaagcaaaactctgtctcaaaaaaaaaaaaaagaaagaaccaaacaatatttggagctgaaaaatatagtaactaaataaacatagtaactaaattgaaaattcactaggggttcaatggcagattcaaataggtagaagaaaaaatccataaacatagacaggtcatttaaaattactgaatctgagaagaaaaagttaaaaagaaggaagaaaaataaacagagtttgagggaattataggacactatcaagccaaccaatatacccattttgggcattctagaaaaagaaagagaaagaaatgggcatagaggttattggaagaaatattggccccatgatccccaaatttgagacaatgcatggtaatacaaatatgagaagctcaataaacctcaagtagaataaatccaaggaggaccaatatcaagacacattataattaaactgaaatcagcaagagaaaagcaactcatgtacaagagattctcaataagattatcagtggatttctcagtagaaaccttgaggccagaaagaagtggatgatatatttaaagggcttaaagaaaaaaaaagccaaccaagaattttacatccagaaagattcttcaaaagtaaaggggaaattagggtattcccagataaacaaaagtcaaagttcactatccctagacttgcccctacaagaaatgctaaaggaagtcctcaaggtgaaataaaagaatgctggagaggaactcaaatatgaaaatgtaaagttctcttgtaaatataaattcatggacaaatataaaaatcaatattattataagtttggtttgtaactccacttgttatttgttacagtatttaaaaaacaaatcataaaaataattataaatatatgttaacttattaacatatatttaatatgttaatatattatattatatattaatatatgttaacatatatttacaatatctatgttaaataaatgttaattaagcaatatacaaaaatgttattgatgacatcaataacataaagtgtggggaggggctggctgggatagaactgtaaaggggaaggatttttacatttaattttcattattggccttataatgtcatgggagtagggtttttgtatgtgattaaaattaagttgttatcagtattaaatagattgctagaactacaagatatcatatttaattcccatggtaaccacaaggcaaatatttattgaatatacacaaaaggaaatgagaagaaaatcaaagtgtgtcactacaaaaactcaagtaaacacaaaagatgtcagtaagagaggaaatgagagacagaaaagctataagacatcaagaaaacaattaccaaaatggcaatagtaaatccttgcctgtcagtagttactttaaatgtaagtggactaaactccccagtcaaaagacatagattggcagaatggataaaaaaaaaatccaactacatgctgtctgcaaaaattaagctacttctatgtgattgaatatgataaaatcaatgaaaaacttttagaattgtttttataataaaatgcttatagtttaatattaattttgaaaaacaaaattgcatttatattactcaaatttatatagtaatgttcacccattcacctcctccttttacttccttcctctccaacccatcttgtttcaaaaattctcaaccagatttccagtctgggcaatgaaaaaaatgaatttatactcttaaggcagagatattttggcatcatcagattgggagactaggttaaataatggattgtgaaatcagacagcctggacccaaaccctgctctcccacttattagacatgtgatttcagtatattcattaaatccttggaacctcagtttcttcattaaggaaatagagacaataacagtacacatctaattagatgattaaatgcaaggtgattgccaaggcacataacaatgctctctgtaactgagggttttatttttcttgaggttactatgcaaattcagagaaaagaaaaagaaggtggtggggaggaagatgccataaaggcatgtaggctttggatagtaatacatgaatacatattcatggaacacttaaaaattatattaactctccaattccatctcagggggattctctcttctgtacaaagacagtgctgggtgactttttacactaccatattggcagctgggagttagtggctataaataccatccattgtctacctgactcctaatgtcactactgcttctctcttggtctgtgtcttgtgagaagacaaaccaagcacttggggttttctgcagaaacacataacctctggaagacacagggcttggtttttcttgacataccttaaagccacagtcaagtaggtagttgacaaggaggaatctaattagacttgccatcctcatgggaagatggatggcctaacataggtaaatgtgtcagacactcatgtgcacattcaggtggtctatcccctcctctgcatgcagtctcaagtcaagcccaagtttgatgacatgaataccagttaagacacattgtcccattcactgaagatgagaactcagactaatacgaatttgctgaccttgtgactagaactttgcacctggtcacaattatagtaccctgattgaataaaagatatatttacctattttcttgtttttaaaggagttaattcctcatttcatagatgaaaccactgaggctcaatgaagtaaggaaatggccaggctgggaatagaaccttgaaatataagcttcttccacaacactgataagttgaggcagaagtaactttggttccatacctttcagcctagtaggagcaagataaggaaagtgaggccacccttgttcttatatcgccatcacggcagatctcttaccttctccttttgagcccagtagtccagtacataacttgcaaagttaaattcctccggtacttcatagtcattccatcttggggctccaaattctgataaagaccggcagcgcagctgtgaaggggcagggtggatgttgtggaaggatttgtggatgccccagagggtccggaacctcattagccactgcatggtgaaacagtcctcagaaaccaggcacagagttctcaagtcaccacctgccttgggaagagatggctaatagattggctgtgtatccaaaactttctccctaaattgggtgcatgtttttggttaattgctacagttatagctttgtttcaggtcaccagaatttggaaggcacccctgattgattttggtggggatttatcttcccagctgaggaaccacatggcagaaaacgctggggaggttatatagctactattatgggtttggtgcgcgttcctaggggtcttctccttcaacctgctaagatgtcagcccaggatggaagccatatggtcatcccttttgtggtagagcaactcgccttttggaaagttctgtaccttatagtgtctttactttagaaacttccctttctgccaagccaaatcatgttgttgccatggaagctgtgatatctttatatgatcccatcccatgactaaagttgattggtccagggttgagcagtcatttctcatgactttgtaacctaagctgggccaatcataatacctctccaatgtgtgtgtgtgtgtgtgtgtgtgtgtgtgtgtgtgtgtgtgtgtttctaaacagatttaaatatatcaggctgtctccctctggtggaatgcacattttgtgtgctgtttgtggttatgattcctatcatgtggagacagcccccctacaggcgagaatgaaactgatgtacagaaacaatgagatgaggtggagtaagaatcctgcagtcattcaagtccctggttcaaattgttcctctgcatgtctgcccctgtcttgttaatattctctggattctgtaagccaaaagattctcctttgcctgagactgggtttctgtcacttgagactataaagatactgaaaaatatacaccatcatcctcagagcagatgctgctgttgacaaaaagagttaaactctgtaaaatatttgaagagatttattctgagccaaatatgagtgaacctggcccgtgacacagccctcaggaaatcctgagactatgtggccaaggtggttggggtacggcttggttttatatactttaggaaggcatgagacattaattaaatacatttaagaactgtgttggcttggttcagaaaggtgggaaaacctaaagtgggggcttccaggctataggtaaatttaaacattttgtggctgacaattgggtgagtttatttgaagacctgggattaatggcaaggaatgttcaggttaaggtaaagctttgtggagaccaagttttattgtgcaccggtatctctcagacaccagacgtcagagagagagcaggttgtaaaatatgtcttagacctaaaagggtatgtggctcttagttgattgtctcctggatctgggaaggaaggaaagaaaacaaagaggaaatggggttctttatagaatgtggatttttcctacaagagacttttcagggcaatttcaaggtatggcaaggaaatatatttttgggtaaaacattttgattttcttcttgttatgccagagtctgattggaaagtaagtcttgatatacagggttaaataaaacccatctgatgagaatttatggtttgtagggcataactccctaagccccttagataggaatttcagcaagataaaaaattagagcttaggccaggcacagtggctcatgcctataatcccagccctttgggaggctgaggcaggtggatcatgaggtcaggagtttgagaccatcctggctaacatgatgaaaccctgtctctactaaaaatttgaaaaattagccaggcatggaagtgcctgcctgtagtcccagctactggtgaggctgaggcaggagaatcacttgaacctgggagtcggaggttgcagtgagccgagatcatgccactgcactgaagcctgggcaacagagcaaaattccgtctcaaaaaaaaaaaaaaaaattcagatcttagtcctcactgctaatgtcactgcactttccaatggactgggatgtggcattgagttcttccctagagtagcattcaggacagctgataccaatgcatcagagttgacacataaaattaaacctcattgccccttcagatcctgaaatatgctgccaacatgacagcaggaacctcctttattaggatccttcttgaagtttgattggaaaaaatggcttaagctggatcctttctttccatgtaaatgttgactgaagaaagctatttctcaaacagctttgagattgaagcactttatcatcatgaacatttaagttccctcttgctcactttcaacaatgataaaataccggctgacaacagacccatataatagacaatagaactagtaatggccagtgatgctgggtctttatttcaacttgttgtcaagtggctggagctgagaattgtctgctttatttaaatgagatgttctccagtttgatgcagttcctaccactttattttgtccctcctgcctgcttctccacttattgtagctgtccagcccctgtgtatatttgagcttaaaatctctaacctaggccaacatcccaggagaggcaggaatttccccaaagtcatgatgcaattttaatattgtaaaaagtaaaatagaggttcctcttcaaagactttcctccccatctaattaggaataaatagtaacttctcttaaaagcaaaatttattcaaagtcctgtgctaagattcttaaatatctgctaaccgtaataaagaaatcaatgtactttatgttcttagctcccacaatttagcctaaatatttgccctggcattcttatactggtccaagcaagcattaggccatagcctgttcctcttgcttatttaaaagtgttttaatctttctcagcatttcacgagttacttcctctttcctttgttctcctctacctttgcctctttaaaaaagttctaagttgctagccaatcgggacaaatacagaatgtgaggtcccgttccagccagtggaaaccggacacagcagtagggtggatgcgtcaggttataaatgaccctgtctcctttgttctatgtactctcctggcaaaactgctggcaagtgtaccatttctgcaggaagtaaaaatggccttgctgagtaaattaaatttacattcaagtcctatttctttacggcaccaaggaacaaacatttcaaacaatattgtagccaagttggttctagaagcccatcacctctgttacattttccaacacacacctccttccacaggcatgagcttagtttgggtgagaatatcaaactcagttgcaatttttctatgcaggtgtctatatgacctcagggtcttccttaaaatacaaactcaccatttttcctgaagacagtccaaacaaccccttactaagtgactaaagaccaaaacaaaagggagagatatagtgagggaatccattaaccagttatcatggtttgaactgtgtcccccatgaatgtatgtggtgaagtacgaaccccaatatttcagaacaccactgtatttggagattgggtctttaaaaatgtaattaagttaaaatgagttattagggtgggccctaatccaatatgactggtgtccttataaaaagaggagattaggacacagacacacacagagggagaccatgtgaatatgaagatagccaaggaaaaagacctcagagaaaaccaccctgatcttggacctccagccttcagaactttgagaaaatcaatttctgttgtttaaaccactcagtcattagtaattttcatggcagccctagcaaaccaatgtactcctcttgatcaaataaagaagaaatgactttggcatcatctcacaaatgtgtttgtgattctaatttaatcttcgtcacatgagagggccaaacacagtgcccagctgtggagaactgtggtagctgaaacagcatggccctagagatcaaacaacacgggctcaaattccagcactttcatttcccacccacataacttggggcaatttatttaacctccctataaaaacataggcatattggcagcacctattgcctgaagccatggtgataaatgcacgatatcctgcaaaaagcattcagcacggacaagtattttagaaataagagctgttgctagttaacacactttatagggaagctcttatagagtagttaagccagaggaaaaaaatttccttaacttttggagttaaggtctaaagagaaggaatggggatgaatacctgaacatagacaccataggactggtatatgtccagctttttcactgattatctgtctatctatctatctatctatctattacctatctattatctatctatcatctatttatctatctattacctatctattatgtatctatcgtctatctatctacctattacctattttctatctatctatcatctatctatctatctatctatctatctagatatataagaacctgatctccaagtgttgaggactgaaaatcagatatctatatgtctatgtctgcgtctatctctatctctgtatgtatgttaagcttcatttctaaatctatttctgtatctatataccaatatttacatttatacctatatcactatctgtgtatatctatacattaatattaatgtctataacaataacacatgtacactgtagtcatgtgccacaatatgatgtcattgtcagtgatggatcacatatacagagtggcccatacaattataatgacatatttctactgtaccttttctatgtttcaatacacaagtacttaccatcgtgtcatgactgcctacagtatttaatacagcaacaagctacataggtttgtagcctagaagcaatgggctatagcatatcgcctatatgtgtagaagactatgctttgtgggtttgtgtaagtacactctatgagttcccataataacaaaatcacctaacaatgcatttctcagacgtatcttggttgttaagtgatgcatgtctctatctctatcactatctctgtctctatctctatctccgtctctgtctctgtttcgatatctatttccatccacatctgtcttcagatttgacttcacaaagcttagtttgtctatttctcaccgtgctggacatagtaagtgctcaacaaaaagttagattcttcccttctttgtcataattcagaaaactgagtgatgaaagtcagaaagagaaaagccagtgtgcccacaaattatctgagttatagaaaaatgtattttttctttctcaagtatttactatagatgtaccatgtacagttttagatactattggagattaattaaactgaaagagttcctaccctgttagagcatatcattaaagcacatcctatgaaatcattttaaagaacaattttctgaactgcttaaagtgcattctgaaagcaatttgacatggtagctttgagaggcagctgggctccccactgtattcccagatacatagtgccttgaacagctcctgcaactaagctttgacttcacaggacttgggactgataaagctatttaatgaagcaacatacttactgtgttatagggtatcccagagttacagagccagggctagatgtttgtctctgttgtctagcagctgggtctttggtgctgttcatgtctctgaacttaagcgcacagtagtaataccttcttcccagctccccataaggattagtgtgataatttacttgctggcactgaatgaagtgcacggtaaggactcaataaatgttgaggtaccttttaactcccagcaaattctgaagccaaccccctccccattagatgttaaccattttttttgaaactgtcacctggactggagtgcagtggtgtgatcatagctcactgcagcctcaatctcctgggctacagtcatcctcctgcctcagcctttcaagtacctgggaccacaggcatgtattactatgcttggataattttttttagaaggcattcactttatagaaagtgagccaacttctgcatagatagaaaagatttccttcaaacattcatctctgactttgtgcctgtctcccacggctcaccacattcagagctgcctgacactaaaccagtccccatttacatgccagccactgtgctaaacatattacatgtacgttcctatttattcctctcacccaatatcaccattgtcattttgcctctaaaatgaagtgccaagaagttaagtgacttgcccaaggtcactcaacttaaaagtagcattgccagaacttaaaattggattacacacacacacacacacacacacacacacacacacacacacacacacacagatagaagctgaccttcacctctgtcttacctggtactgtttaggacgtagctgaactaggtccctggtaggtatggaaaaggaggttgagctctcttttgtaggttcagttctctctgatcaggtgatccgcaggattgtgcacccagcagaacttggcttctggccacagcgaagggggaccttgaacagagaacttgttaggaattgggtaattcagtagggggaggagatgctcaggtaaaataggacagaaacaattacaggcctccacggagagataatcacttagaaaacaaaccatgtgggccgggcgcagtggctcgcgcctgtaatcccagcacattgggaggccgaggcgggcggatcacgaggtcaggagatggagaccatcctggctaacacggtgaaaccccgtctctactaaaaatacaaaaaattagccgggtgtggtggtgggcgcctgtagtcccagctactcgggaggctgaggcaggagaatggcgtgaacacgggaggcggagcttgcagtgagccgagatcatgccactgcactccagcctgggagacagagactctgtctcaaaaaaaaaaaaaaaaagaaaaacaaaccacgtatacgaagtcacctccaattccggtggcatggctaggggtgtgaatgaactagatccaatggtgcattttcactagttctctgtggctaacctgctcccccttcccagccctacatcaccatagtctcccttaaatgacagctgagagtcagtgtagcctaatggataagagcctgggctctggaggtctggaggcagaaaggtctgagtttgagccttaggtctgccacttaacctccatgtcatctttgtggaccttcttgctctgggcctcacctcccttaattggttttcggttgcttttgagacagaatctcatgctgtcacccaggctggaatgcaatggcatggtcttggctcactgcaacctccgcctcccaggtttaattgagtctcttgcctcagcctcccaagtagctgggattataggtgcccgccaccacacccagttaatttttgtatttttaatagagacagggtttcatcatgttggccagggtggtcttgagctcttgacctcaggtgatctgcccgcctcagcctcctaaagtgctgggattacaggcatgagccacagcacccaacacctaccttatttgtaaaataggaatgataacaacaatacctacctcccagggtgttttctttgcttcttcatttgtttgttagaactagatgaaataatttataaaaagcatgtagcacacggtgctgggcatagtcgatgttggctctttttattcacttgggattctcagaggaacaatttggtatcctggtaaaatgcagggtctttggaatcccaaagtcttgagcttaattaagtccaacctcaggcactcacaagaaagctcttgggtgaaccattttcctttcaaagcttggtcttgacatttgtaaaatgaagcaggatttgttaataagatttgttgcatgggatcattgaaaggattatgtgacaccaagcctgtaaagcacctggaccaggcatttagatggagggttgatagtgatattgcattggataaaccaaggtagtcataggtagcggcttgtactatgacttttctactggagccatttttggggcattgttagagaatgagggatctccagtattttcattgaagctgggaagaaattatttctgatcaaagtcatggctaaagatttctggagacacccaggacattcctgacaggaccgtgtggcaagctaggatagtttgggtttttaatatttagctttctgtggccagtcactggagaggtgagaaggcagggctagttgactggccatggtaagctaaaccttaaacacccaaagcatcaaagtaccaaaaaacaaagaaacgaacaaacaaaacaactaaccaaaaaacctctgttactaaagagaaggagcagccacttttcggaaaagaatggagacgggggaaaagcccttgacacactctctgcatctgagtagttctcccctgtggaactgcaacatgaaggcatggacaagaagacaggctctggcaccaggcagcctgggcttgagtctagcttttaccagttaccagctctgtgacattgagcagatttcttatccctcttttcctcaattttctcatctttaacaagaggtatacagcggacaaaggaaaactctccaaacattctatgtgtgctcctctttcatttcccaacctctcttaaagctaaagtgaggccattaaactctagttctgaacaataaactccatgtggaagtgttacaagtcacttctggcctagggcatttatttaagagcaggtatgagttttctgtactctcttcccctgattcaatgctcctggaaaccatatatggagatagtgacatcgtaaaatggcaaagtctctatcagccttgttctctgagtgacttcatgtagctaaatatcctaccaacctcagctttttgaacttgctatcgtctgcttattatagaaaacctatgatacattcattcattcagtggatatttaaggaacatttaggcgtgctttaaacatgtaagacaaggttggtgctctcaagaggtttacatgcctatgatagaaaggcaaaagccaataagcaaaaagtcaattaaataagcaagaggatttcaaatggtgatactgccaaaaagaaaacagaacagggcaatatgatggagagagtgtggggaggtggctaaggatgttctcccttaagaggtgacattttgagacctgaaggaggagaagcagccagctagggaaaaagaactccaggcaaaagccacagcaagtgcaaagcctgaggctgacattttcaaggcataggtgggggactgggatggcagattactgagtgagaagcatgataaagtgtgaggtcagagacacaagcaggagacatgccattaaggatctttatggacataataaggagtttggattctattctaagtgcaatgggtgggtgcatggaagtctcgtgaagattttaggaggaaagagacatgatcctattaagtaactcattttcttggtgacttgattttgaaataaagtaatacaggaaagtaaaacattcagaaaaagaggtcagatttgcatttagaaagcccactctggcagttctgtggagaagatattttaaggaggcaagaatggatgtggggatgccagtcgggaggctactgcaatagactaaacaagtaatgacggtggctcagacaagagttatggcactggagatggaggtaagcagacggatatgggatagatctttaagacaaccttaggtggacttgttgatggttttgatagggagtgaataaaaagaatcaaggatgaatctcagcctttgacttcttcaataatataaatggtaggtcataatttatatataaaaaatgctgaaaagattatatagcacatacaaagtcacggaggctacagaaggcaggaataggacttgaatcatgattttatttaagctagtttttcctgcttataggctgtctctatcctatctgccatgcttctcaatactctggaattgatgacaatagaaaattccagtgtggttttatttttgttcaaccatgccgtataaattgaccaatgacttccccactcatctcagatccagtattgcatggacttgtatactgtggaaggagtgatttgaaataatgttcggaagacacttgacaatgtctaccatacagcaagtgcttttcaaagggtggctgttacaaatttttaaaaagaaacttcagagccagatagaccaaactggaatctttttaaaaaaatttttactttaaattctgggatgcatgtgcagaacatgcagatttgttacacaggtatacatgtgccatggtggtttgccgcacctatcaatccgtcatctaggttttaagccccatgtgcattaagtgtttatcctaatgctctccctccctttcctcctcaccccttgacaggcactggtgtgtgatgttcccctccctgtgtccatgtgttatcattgtttaactcccacttatcagtgagaacatgcagtgtttggttttctgttcctgtgttagtttgctgacaatgatggcttccagcttcatccatgtccctgcaaaggacatgaactcattcttttttatggctgcatagtattccatggtgtatatgtgccactttttcttcatccagtctagcatggatgggcattctggttggttccaagtctttgctactgtaaatagtgctgcaataaacatacatgtgcatgtatctttatagtagaatgatttctaatcctttaggtatatacccagtaatgggattgctgggtcaaatagtatttctggttctaggtccttgagaaatccccacactgtcttccacaataactgaactaatttacactcccaccaacagtgtagaagtgctcccatttctccacagctttgccagcatctgttgtttcctgacttttctttttttataagacagagtcttgccctgttgcccaggctggagtgcaatggtgcaatcgtgactcactgcaacctccacctcccaggttcaagccattctccggcctcagccttctgaatagctgggattacaggcatgtgccaccatgcccggctaattttttgtatctttagtagagatggggtttcaccatgttagccaggctggtctcaaactcctgacctcgtgatctgcccatcttggcctcccaaatgtttcctgactttttaataatcaccattctgactgacgtgagatggtatctcattgtgattttgatttgcatttctctaatgaccagggatgatgagctttttttcaaatgtttgttggctgaataaatatctcctattgagaactatctgttcatatcctttgcctattttatgatggggttgtttgtttttgttcttatcaatttgtttcagttccttgtagattctggatattagccatttgtcggatgggtagattgcaaacattttctcccattctgtaggttgcctgttcactgtgatgctagtctcttttgctgtgcagagctctttagtttaattagatcccatttgtcaattttggcttttgttgcaattgcttttggtgttttactcatgaagtctttgcccacgcctgtgtcctgaatggcattgcccaggttttcttccagggcttttatggttttgggttttacatttaggtctttaatccatcttgagttaatgtttgtatcaggtgtaatgaaggagtccagttttagttttctgcatatggctagccagttttcccagcaccatttattaaatagggaatgcttttcccactgcttgcttttgtcaggtttgtcaaagatcagatggctgtagatgtatagtgttatttctgaggtctctgttctgttccattggtccatatatctgttttggcaccagtaccatgctgttttggttacagtagccttgtagtatagtttgaagtcaggtagcatgatgcctccagctttgttctttttgcttaggattgtcttggctatatgggctcttttttgttccatatgaaatttaaagtagttttttctaattctgcaaagaaagtcactggtagcttgatgggaatagcattgaatctacaaattactttgggcagtatgaccattttcactacattgattcttcctatccatgagcatgaaatgttttcccatttgtttgtgtcctctcttattttcttgagcagtggtttgtagctctccttgaagatgtccttcgcagatttttttttttgagacagtctcattctgtcacccaggctggagttcagtggcatgatctcagctcactgtcacccctgcctcctgggtctgaaaaattcttctgcctcagccttctgagtagctgggactacagaaacatgccatcatacctggctaatttttgtattcttagtagagatgaggtttcaccatgttggccagcctggtcttgaacttctgatctgaagtgatccacctgccttggcctaccaaagtgctgggattataggcattagccacaatgtctggccagaactggaattattgtcctaccagttattaatattaggccacacaaatattgatagttattgcaatgctcttcttctatttcttcatctgaaaatgagaaaaaaattgtaaaagttaaaagagataatatatacaaactacttagaacagtgcctgacacttagcgagagtattattattagtattatgtattaggacagggaaacgaaaagatagaagaaatgactacttcttaagtacacattgcttagtaaaatttataagcataactccatttacacatatattaatgctgcaagcttgatatttttattttcattacaaagatgaagaaattgagactctctgggtttaggcagctatataatatggactcaaatttattgaatgtttgtttcaggcactgtttccaggcttatatatgtattaatcatgtaatctaaaaccttatgtgaaaggtagtattattactacgtttttactaatgagaatattgacattcaagatttttagctactgcccagcctcacgaaagccagaaaatgatagaatgagcacttcaacttagatgcacctggatctaaattcttagcttagtcaccatgtttaactactagcacaagttcttcccagggctaacttagaactgagagaacacacaggcccttgtaaatcatactttgttttgatttctagagtcaacatgtcagaattccaggaagtgtaaatgctctgaggcagaatacaacttagcttaaatctcgaatactgattccaatccaaaatgctctcctacattgtcctgagaactcttaatatgtcttattaaagacaaaaaaagaagaggcatataaaagacatattaagagttcccaagacaatgtaggagagtataaaagtatagccaagttataaaacaggatgacttcataaaagaggatgattttggagtataaaagtatagagtatgaaagtatagccaactaaagccaagttaccataaaagtatagacaagttatcataaaagaggatgatttgggagtagatttttctaggtaagctaaaattcacatgctcacaatgagtattggtggcacagataaatcaaataattcataactagaatttaattgtagggctttcacttcaagtatcatgatcttcaagtatcttgaagtgaaatgtactatgtagtattttccataggatcaaccttttgataggtaccaactataagccctggacaaaatataaataacaacttcagggccaggtgcggtggctcacgcctgtaatcccagcactttgggaggccgaggcgggcagatcacgaggtcaggagattgagaacatcctggctaacaccctgaaaccccgtctctactgaaaatacaaacaaattagccaggcgtagtggtgggcacctgtagtcccagctactcaggaggctgaggcaggagaatggtgtaaacccgggaggtggagcttgcactgagcagagagagagccactgcactccagcctgggcgacagagcgagactccgtctcagaaaaaaaaaaaaaaaacaacttcagaatgcattagagattaggcaacataaaaataaattaggaaaagtctacctttgaagaaataaatggcattgagtgagttttcaatttttatggaaaaatttcaagagagagagagaagaggagcttcaaattttgtgtataaattctgcccaaatccatggctgatccctgaaatacacagaatccatgcagcctcaggctaaaagaaatgaataaacaaaacaaaatccagattctctaccaaaatccagagtctctacagtatattaacgacaatgttcaatataaagtctaaaattactagatacacaaagacacaggaacacatactcatttgcaagagaaaaagaacatcaatgaagaaaactaaagactcagatgttggaattagtagagaaggatttcaataacagtgctacagctgtaatgattatgctcaaggactaaaaaattatgttcaatatgaacaataaaaatgttagtggaaaaatagaaatgattttaaaattgagactatttaagaatgtattactctaaattaaaaatgaacttaatggaccttatagcatattggagatctaagaaatttagcatacttgaaattagttcaaaaggaattagcagtcttaagaatagagataaaaatatttttataaaaagtgaagcctcagtgaatcgtggaacagtgtgtgtgtgtgtgtgtgtgtatacataaaaattggagttctagaaaaagacagaaaaaatattttaagaaataatgaccaaaagttttccagattttggtgaaagatataaatttacagatccaagaatattagaaaaatctaaaatgggagaaatacaaaaaaaaacaatacttaggcatgtcataatcaaacttcttaaaatcaaaaagaagataaaattttgaaagaagacagaggaaaatgatacattacacatgtgggacaattgttcaaattaccactgacttctctacagaaacaaaggaagctaggaagtgatgtcagcaagatggcagagtaggtagtcccccactcacattccccaatggcaacaataatttctcatctattcaagggcaaaagtgcctttgtgagaacctgaggatttaggcaggagttgtaaaaccccagtggagcccaagacctaggagagttgttttgagagggtagacccacacccaggtggtaaactcattgatggtggtcctaaccccagatttggaaatggccccatctgcctcatgtttgttgaaagccctatttggacttgatcctgctaccaaaaccatctgcctagggctctgacaggaggcagtcatgcacagtagtacctcagaagacaggcccactgaacttgctctcaactgaggccctgaaacaaccatctaactcaactccagcccatctcagctgcagtaagcaatcagtcctgcttgcataaggacccagagagagacatgtccatatgagtccctagggcaggattttggattttagtccccaggcagatgagaaagggcccttaatcttgcctccaaaccctctcagcagcaacccaagagcaattttgcctgtacatggagctgctgagagacttgcccatctatgccactgggacagccttgccaacttcagtcacattgcaaatcctgaaatgaccctgaatttcagcccaaggctccctcagctgaggtctaagagcagttctgcccagccagggaatagctgggagacaagtccatgtgagtccccagggtcatacttgccaacctcagtccccatagcagatcctgaaaaggccctgaatctcaactccaacttagctacagatcgagagcatggctgcctgcccagggacccactgtgagacatgcccatcagtgacaccagagataggcctgaatatttctgtctcagttgtagaccttgaagcagccctgcaacttggtttccgcccctctcagctgcagactggagcagtactgcctgcccaaggtctcacccagtggtccagcaagagccctcctggggacctggaggagtcatacccattcacaaaccggacaacaggcctattcctgtgcacctgaagtagaccatcagcccagtaccagccctttggaccaaggtcctggagacagtagagaccaccctgggcccagacaggatccacgcctgctagagcccctgatagtaggctcaccaactgtggactccattgtggacccagcagcagtcatgttacctggctccaaaagcatttggctacaatcccataggcaaactcatttgcctgggaacttgtactgcctgggaactgttaagggaacttaacagaacacaaacctgccaaaaccagtttctaaggcctggaagaagtatttgctctttcaaatgaaaaggttacttgaataacaagaaatcagacaaacatgaaaccaccaaagaaaattaacaaagccctagcaacctaccacaaaaaattggatatctatgaattgtctgaaaaaaattcaaaataattatcttaaagaaggtcagtgagatgcaagaaaacacacctaaacaactaaatgaaatttaaaaaaataacaacgcataaaagtttttcttgcagggcatggtggttcatgcctgtaatcccagcactttgggaggccaaggcgggtggatcacttgaggttaggagttcgagaccaagctggccaacatggtgaaacctacactctactaaacatacaaaaattagccaggtgtggtggtacatgcctgtaatcccagctacttgggaggctgagacaggagaattgcttgaacccaggaggtggaggttgcagtgagctgagatcacgccactgcactccagcctgggtgacagagtaaaagcctgtctcaaaaacaacaacaacaacaacaacagcgacaccttttggcagtgcacaattattttttaatggaatctttagaatttttctacttataagatcctgtcatctgcaaacagaactaataaacaaattcagtaaccttgcaggacacaaaaccaacgtacaaaaattaatagtgtttctatacactaacaatgaactatctaagaaagaaatcaagaaaacaattccatttataaaacactcagaaataaatttaactaaggaaagtaaaatacctgcagactggaaactataaaacactgatggaaaaaattgaagaagacacaaataaatggaaagatatcctgtgttcatggattgaaagaattaatattgttaaggtgtccatattattcagcgtgatctatggactcgatgtaatccttgtcaaaattccaatgatatttttaacaaaaatagaaaaaaacaattctaaaattcatatggaaccacgaaagatctcaaatactccaaatatgcttgaacaaaaagagaaaagctggaggcatcacactccctgacttcaatgtactacaatatactgcaaaactatagtaattaaaacagcatgttattgtcttaaaaacagacatatgcatcaatgcaatagaatagagcccagaaataaaccattgcatttacagtcaattgatttttggcaaacttcctcagataacataatgaagaaaggacagtctttttaataaatggtgctaggcaccaacatggcacatgtatacatatgtaacaaacctgcacgttgtgcacatgtacccaaagtataatttaaaaaatggtgctaggaaagctggatatccacatgctgaatggcgtcaacccaggaggcggagcttacagtgagctgagatggcaccactgcactccagcctgggcacagagcgagacactatctcagaaaaaaagaaagaaaaaaatgatattgcttaacataagttatgaaatttataaaatgataatgaaaaatgaacacaaagctgaaatggttaacataaaacactcaattaaatgtaaaacaagcaggttagattatgttttctgactcagaattattgctatacctatacatggcaaaatattttggtttctgctgtaaagtgtatgcagtaaagcctaagatatttgctatctgaaaaccactagaagaaaactgcccctaaccctgaagctagaggtcaacctattgagtgcattcatatcacaaatataccacggatactaattatttataagtcattaagaacaggtggtttgtaaaataaataatcttatatttttacattgaatgaatactctaaggtattttcttaacccacttccttatccttatacagttattcactttctcaagaagggatgatatttaaaagcttttaaaatatattcataaataaagtctccttcctaggaattcaactccacatttccctttttagctaacttcagggaactcaccaggaaataagtagtttggcttatagcacaagtcttgggagtctggggaatatacctttgaatcctttcagttctttgccacttactgactttgtgacccttgaataagttatcatgcactgggattaattttaagtgagatgtcaggcacataataaatgttcaagaaacagtagtggttatctgtaatactatatatacactccactttattcccaataattcactttagaaagtacaaactaccttctctctttcatctaattaggacgtgcatgttctttctgcaattaactggtactttaaattcagacttatctccagccagtgtttaggatgagataaactaagcattgccaaagtagtctaggcaaggtttgatgatgctagaccactagaatccatagagtggagggctggctctgccactccccagctatggccaaatctcatattccaccaatgggcacaaccacatggaccttccagggttgcttaaaacagtagtctctaggcattttgggttgtataatctatcaataaaaatatttagaatacacatcttcccatctgagtgtagcacttacattgttctactgcactaatatagtatgcatactataaaacatagatgaaaatgagataaaagcattaaaagaattgtatctcagtaatttttaattttattaaattattaacattattttaaaaattaaatacagatggggtctcactgtgttacccaggctggtctcgaaatactgggctcaagcgaccctcccatcttggcctccctatgcactgggattacaggtgtgagccaacatgcccagccgataattttttaagtttctgttctcatttcttagtcccagtggattgtcccaaaactcactttggagaccattggtttagaggattgagtgaaatattgctcatgaaatgtgttataagctgtaaagtgctatttaagtggtacataataataatttaggtcgagtgcagtggctcacacctgtaatcccagcactttgggaggcctaggcaggtgggtcacctgaggtcaggagttcgacaccagcctggccaacatggtgaaaccccatctctactaagaatacaaaaaattagctaggcatggtagtgggcacctataatcctagctacttgggaggctaaagcaggagaatctcttgaacctgggaggcggaggttgcagtgagccaagatcatgccactgcactccagcctgggtgacagactaagactcccagactctgtctcaaaaaaaaaaaagattcaaatattacattaaaatgttacataataatggcccaccataataatgtctactatattccagacacttattattgttattcccattttacagataaggaaaaaaagacacagagagatcgaggtcacaaagctagtaagttgcaaggccaggattaggcccatcgtctgtcagactccgaagccagtgctctaaaaatctctcagggatcagagtcttgtacaatatcattggagaatcaaggcagaggtaactgaaggatggattgtaatgctcctcctcacccaggcacaaagcccaaatcttccaccgtccacagagtctcacttaagggatggcggttctgtttagtgtccttcccagggattgtcttcatgccaggaacaatccagctgacagcaaaatatatcctctaccggctgcaagcatccaaggccaagtgcattgtggccagtgaggaggtggtcccagtagtggagtccattgcactggagtgtcctgactttaagaccaaactcctggtgtctccacaaagccggaacaggtggctcagtttccaggagttatttcagtgagtatttttcccagccaatctacgctgccagcaacaacacaaattattgctacatcttggaatatctttgcctccaaggactcaggaacactgtgagttgatctgggctcctactcggaaaagaattacctaataaccagatttaagggcataaggaagggatgtagttctgcctccatcctcctgcttcctagtggtctataatgagtatcctgcattatatggctcttgcttaaatctgaaccaaccacgtatcccaccactcttccttttcttcctcaaacatgccctatctcagggcctttgcacctgctgtttcttctgcctggagtgctcttcctattccttttcatgagtggttccttcttgtcaaattttggctcaaatattttatcctaagtgaacttctccttgaccacattaccccagcctcgcaagtagctgggattacaggcatgagccaccacacctggccctgtttttgtaaataaagttttactggaatgcatccacactcatttatttacatgttgtctatgtaacaacagcagagtggagtagttacaacagaaacctaggcccacaaagcctaagatatttgctatctggccctttacagaaaaagtttgccaactcctgccctaaaccgtaagttctaagaaagcagagactttgattgatcttcctatcctcagttcctaacacatagatagtgcttaatatttactgaatgaatgagcaaaagaaatcacaactacagttttcttcatatgtaaaatgaggataattatactgtacatatctcttgttgttttgaggataaattaaatgaatatgtgagaaagtgtttcctaagatgtaaaaaaaagagtaaaatattaatggtattattcttcaaagaggtgttgagtagcttatgtttaaaaaaaaaattattccaggcctggtgcagtggctcacacctgtaatcccagcactttgggaggctgaggtgggttgatcacctgaggtcaggagtttgagaccagcctggccaacatggtgaaaacctgtctctaaaaaaaaaaaaaagtacaaaaattagccaggcgtggtggcaggtgcctgtaatcatagctacttgggaggctgaggcaggagaatctcttgaacctgggcagtggaggtttcagtgagctgagatggcaccattgcactccagcccaggcgacagagcaagactctgtctcaaaaaaaaaaaaacaaaaaccagagaagtttatagaaagagatgacatgtaaaccctgctgaataatagttttatttgttagaataaaattttctcccactgattaatatatacaaaatactatttgtccaatcccaaaattctttcccaagggccacatcagtgaatattgcttgtgtcttttataagctgtgtaaccttggataagtaacatttgctgaaactctgtatcttatccatacaatggagataatgatagtatctacctcatggggttgtaggagaatcaaatgtgataaaacatgaaattcttagctgaatgcctggcatagagtaatcactccataaatattacagtaattataactgcaatcattattataattttcaagttaacaaagtcattcaacagtagtgattcctaaggtagtggtatttatattatttgaatatacatctccattagtaaaatactttttaacatacccccccatacatgtatttatttatttataaattatatacatgtacttttgtgcattatacgaataccaaaaataaaaattttagaggatgagtaaaaaaatacaattgtgccactgcactccagcctgggtgacagaatggaaccctgtctagaaaacacaaaacacataattttcaattcttgtctcttctctatcccagttgccttgcacacttcctgagcagcaagcacttccacttcagagactcctgtcctaaacaactttgcaatattctgtagagtccccaagaaaccttaaaggagccacaaaatttacaaacgataaaggactttaattaaactcatgtggatctcaaattgaaatgtgcatattttgggggtagttttcaagatggaaaaaatcctcatttcaaactttgaagtgccataactccaaaaagggcgcagattgtttctctaaaaactagggaagggaaagctgtctcattgccaacagttggctagtttttcagaagactacacacggcaataatgtgggctaattttacactgttagagttgatcttctattcaaggagttcattttaaggcttctcaccctccttctgactctcaagtgtatacgttcatgaacactttccagaatattcataatggatgagggaaaaggtcaacattataagccagaattatatttctctttttctgtcctagtacagaagaccctgtccaggactctggattctgatcttgagggggtcaagatggtgctccagtttcaggaacagcaagagcaaagatatggaggcaaaaaaaaaaaacaccctaaggtgtggaaggaatagactacacacagtttgggctagctagagaacaaaatatggagatagagtgaaggctgtaagagcaaacagaggccagattatggaagatctcatatgccatgataaatcttaaattgcccctgtaaacaagggatgccattgatgggtttaagaacagaagttccagggccaggtttggattaaattaaattaaatagatttatctggcagctatgtagaggattagtttgaggaggaccaaactggaatcagaccatcttggagcctaatctaggaaagaaatgacaaaaatctaaacctgagctctgatgaataggatggagggaaagcagcaaactaaagaactagcaggacttagagaatattggatgtggaagatgaaggaagaaagagtcaaggttgatctgctttttgacttaggtgatcagtgggtgggtaccatcggttggagagagagagagagacagtcgatgttaggataataagtttacagttggacatacaagatcgaaggttctgtgaacattcaaatgtctagcaggtggtggatatatgagtctcaggaacaagaggcaaagatacaaatctggaagtcattagtatatacttagctctgaaaacctggaaagacataactcagaactcaggtattcaaggaaaggaagacaagttggataatggaatcactgcttgtcactcacagattgtgatgtcttttcttttagatagacagacagatggatagacgaaagatagatagataggtagatagatggatggatagatgaaaggtaagtaggtaaatagatagacagatagatgcctcctaccaaaagatttccatactggattgagaagtatttaaatatgaggggtctccctgcaaggtatcagattctgtgaagaaatccccctctctctagcccaacacataccaatttgactctatatttgaattgaaaagaaaatcaatatagctgaatgaatgatctttttctattttaaggggaggaaggaagttaccaagaaaaccatgttaatattttctgaaactattttcaaataatcttcactgttcgacagtcatggtggctcacatctgtaatcccagcacttttggatcctggggtgggtggatcacctgaggtcaggagtttgagaccagcctggccgacatggtgaaaccccgtctccactaaaaatacaaaaattagccatgtgtggtggcacatgcctgtagttccagctactcagacagctgagtgaggaggatcagttgaacctgggatgtggaggttgcagtgaaccgagattacaccactgcactccagcctgggtgacagagtgagactccatctcaaaacaaaacaaaacaaaacaaaaaaaaatcctcactgtttttacagtttcaatgacaatctcattcatcatcaagatgaattaaaacagcatccttaaccctgttcccttcaaccagagaaattaagactacgatacaccagtttcaaaaatccttagatattgtatcagttacccatcactgagtaacaaaccatcccagcacttagtggtgtaaacagtagtattttatttgctcatgattccatgggtcagaaattcacacagggctcagcaggggcagctggtttctgctccacatcagcctgactggggctcgagtatccaaggcaggttcaccctcaagtcaggctggctgccagctgaagcaccttggttttcctgtacatggcctctctctccagcaggacagtctaaacatctttatatggtggctaagttaccccccagggaaagtgaaatctatgaaccttcttgaggcctaggctgagaagttccagaacctgtgccacagtgcattaatcgaagcaagtcatgggaccaccccagattcaaagagagaggacatatgctctgctctccaatgaagcaatggcatacaggggtggtttgttactcagtgatgggtaactgataacaatatctaagaatttttgtatagggattgttggcagaaaagctggggcaggactggcttgtctgtcataaaataaaagagtcttggaagatgtctggggtccagggtctaaaacccctcgtggcctttggaacagcaagctctgtgccaaagggtggaagactgccctgccacaccacaaatctaagcccatggcataaaactcctcgtggcttggatggaacccagggttcagggcataaaaccccttgtggcccctggaatgtgcacagacttgttggttgctctcccaggcttataaacatgctctccattatcgcaagcagcagagcatattctatatgcatcaaagaaaatgctaaaccattacagctacacttgatgcactgctacatttctactcccacatcctcacaccctcacctgtttaccctcacgtcctcaccacgtgcttctttgtttgatcaccaataaatagtgtgggctcctagagctcagggccttcgcagcctgcataccagcgttggccccctggacccaacttatgtactcttaacctgtcttttctcattcctttgactccgccggacttcgtagcccccacggcctggtattgggtctgatcaccccaacagggataaaaggaatcatggagctatctttgtagacaatcttacacagagattgttatcagttagaatgtctttggatttagtaacccaaatacaagcgactaaaacaatacaaacaagtttattatctgacaaatgaaaatacacaggtaaggtggactgaaagttggtgaattcagtggttcaatgaaattaacagggacccaaatttattcatcttcctaacgtgctacccttggtatgaacccaacatagctatggtagctccagacatcctgtacgtgcacaaaactcaaaggccataaaacaggatggggcaagggaagaaggctgcatctcttcctcatgactcttttcagaacaaagaaatatttcccattaaagccatatatctcattgtccatactgcatcatgtgcctaatcttaaaccaaaggaatgactgtgacttgcttagattaatcaagctcccccaggagctatacaggacagtcttaccggaagcacttgattgcctgatacctgaacaaaatcagttttatcagtgaaaggaagaagaagaggacagctatttgataagcaactcattctgtctgctacagatgtcgaagatattgaacaagaattatttataagtttgattcaaatatcaaaaggtgccagctgaagcaccttggttttcctgcacatggcctctttctccatcaggacagtctaaatgtcttttaataatacaagatgtcctttaaataataaaaactcctgaaacattaacagcaatttacaaagattccatgctgatttttaaaaactcgtagatttttctaaaaagcacttggaaaaaaaatcttacaatagataaaatgcatgtccttttgttattaatattgaaagttatcttggctatttatttaggctatagggagatgaagcttaaaaaaagaagaagaggaaggaagaaggaagaagaaggaggaggaagaggaggagaaggagaagaaggagaaggagaaggggaagaaggagaaggaggaaaaaaagaagaagaaggaggagaaggagaaggagaagaggaagaggaagaggaagaagaagaagaagaagaagaagaagaagaagaagaagaagaagaagaagaagaagaagaagaagaagaaaagaaagaagaagaagaactggactgttaaattttttagcagggactgatcttccaagtccctcaaggagaaggaaaaggagaagaagaagaagaaaagaaaaggagaaggagaaggagaactgtaaaattttagcagagactgatcttccaagtccctctaagatttcttgagaatccctctcaggaaagctttggattaggttcagttctgttaactatcttctggtaacaagagggcataagtagctgagcagaagaaatatcagagttaaactggccatcttacaccaccatcttggggtccatccatattttgcagatccgcctctgaagagcacagctgtgtggaaacaggaagtcaagaaccagtggccatttatttcaccagtgggacgacaggctctcctaagatggcccagcactctcagagcagcttcagcattgggttcaccgtctgtggaaggtagggaagaaaactctggttttgggtttgaactccccaaagagctgccaatatgtgtatccaactaatcgatacttctccttgaattgctataagatattgccaattaattgctaccaaacagaacttgtgctggccgtgcccaacctagcttagtaaatgacacaatctaaccagctgatcaagcaagaacttaagaatcgaccttaattcagtcccttaacaacatgtctggcttcctttaatcattgctaggtaaatttacctacccagaaaggccttcctaaaagagagactatcctaagttttcacgttaccctattttattttcctaatagcatttacactatttaaaataatgatatacttaattcacttcattgtatatgtattcgctgtcacctaaaataagagcagaggtctggtctcttgctcactgctgtagaacagtgcttagcacatttttacttaacaagtatttgttgcatcaatggacaaactcaaaaaatcatgccaaacccagcctcccactctactctcagacaacctaggattctgaaaaggcctttaagaagagtagaggtagaatctgtcaacttgcctggggcttcttttgacccttctctgcagcccttaaggtttgggggcaaggtcactcctgaaagataccagttgtttttaatttttgtttgtttatttttggtctgttttgtggcttcttcatatcatttagatattggctggatatctaagtcctcagatagcatatggaatgtgtctgacacaggctgggtcaaggccacctttggcagtatattttcttcctggctttatggagcctgtgtttttatgcatcagatggcacagtttgacattgacaccttcctagatgtaagtcatgtcctccagctagatagatctttagagctcttccttgtctcccataaaatcacaaagaaatgatacctcagaataccaggcttcttgggcttctggaaatcatttctttataagaagcaaagtctccagggccttggcttttgaaatgtgtttaacagagtggggcggggtgggggaaacaactgcaacactctcaggcaggaaatccagacttctgcttcaaatagttcaggatttgctagtgtcactgaaactgtagctacttaagaatctggttctaaataacagattagaagtctcaaatctaaacaaatacttcatttctaattcagtgaaaccaagataatagctgataaaccatgactcttgtgcagagcagagattaaaagtgcgggcacctttgcccagagcagctcctcttactcttccccaagttgttaattctcagaacgtaatactcttctggaaatcagacatgcatgccctgccttctcaaccagggacagctagattgagatatcagataattctaatttctttagcctttagaaaaatgtgattcaggccaattattttcaaccatgacaaatcaattaagtttaagaaaatacatattattacatacaaactacacctatgtgtgaataaaagctgttcacctgttattttgctaactggcctgacacggtggtttaaggcagaagtcccccagcctttttggcgctagggactggtttcatggaagaccatttttccatggtcaagtgggagagggagggattcgagctcattacatttattgtgtgctttatttctattactattaaattgtaatgtataatgaaataattatacaacttaccataatgtagaatcagtgaaagccctgagtttgttttcctgcaactagacagtcccatctgggagtaatgggagatagtgacagactatcaggcattagattctcataaggagcctgcaacctagatctctcgcatgtacagttcacaatagggtacgcactcctataagaatctaatgccaccactgacctgacaggaggcggagctcaggccataatgcaagtgatggagagtggctgtaaatacaaatgaagctttgcacactagccttgccactcactcctgctgtgcagcccacctcctaacaggccatggacaggaaccggtctgtggcctgggtgttggggatccctagtttaagggccttaacataaatgtaggctaacataagaacggagatctccacatcaggtttacaaagtgccctaaagttggtaagttaactttgcagtttcaaaacctacatttgtaaaataagaagatttttattttacaaagatcatgtgtgtatttcaagtgctataaaaacctttatagatgtatactattcttagatatatacattacactttataaaaacaattagaatccatggagcagatacacatggtaaaaatgctgacttacagattaaacatttttctttaactatgacaatccagatagcccagacatccaatttgagcctcctcacaaatgcttaagtttaatacaaattaccaataagttgtcctatttagtgcgaagaaaataatatgggtactatagacagctgttaagaaagtggtgaaagagtaataaaaagggctcaggtgctggtgtacaatgtgtttgcagctttgatgatgaggtctttggagtagaagcctgtgaggaaaggtatacctgtaagtgcgagattgccgatcacaagggaggaggaagtgaggggcgaggcttgaataatcctcctatttttcggatgtcttgttcatcattgaggctatggatgatggacctagaacatatgaatagtatagctttaaaaaaggcatgtgtgcagatgtgaataaatgctaggtgtggttgattaatgccaattgtgactattataaattctagttgacttgaggtggagaatgctatgatttttttttgatatcgttttgtgttagggtgcagattgctgtaaatagggtagtaatagccctgagacataatgtaagggtttagattgataaattactttttattaaagagtggaagaggatgagtagaaaaactcctgctacaactgtagtgctggagcagagtagggctgagactggggttgcaccttctatgacagagggaagtcaggggtggaggctcaatttggctgactttcctactgcctctaagagaaggctaaccagtgggagggagttgggggtaggatttagaataaatatttgttgaaattcttgtgttggaggacaggaggaatcatgccatagctagaataaagtcagtatcactgatacgattgtacaggactgcttgagggttgctgcattagtatcagctcagctgtatcgtcagctgattagtaggaaagatataattcctacaccctctcattcaatgaagagctgaaagaggttgttggcagtaaccagaatgagtactgttattgataaggaaaataactaaatatttgaaaaagtgattgatgttacggtctgagtttatatgtcatattgagaattctataatagatcaggtaacaaatagtgctactgggataaatattgtagaaaagtagtctagtttaaagcttagtgagggtttaagggtctggatcctcattcaatgtcagtttgagacaatgacttcttggtctgtacacataaatgttgtggggataaggctgatgataaagggacatgtgagagatgattttacataattggggtatgagccttttttaaatgtgctggttaaggtaacaataattggtaagattaaggggactagggctgttgtgatagtggaagaatgcatgtttgttacttttatttggagttgcaacaatgtttttggttcctaagaccaactgatgactcttatcctttaaaagttgagaaagccatgttattaaacatggtggcatgagttagcagttctagcacacttttaagggacatagtggaacttctccagaaggaggagctctaaaacattagtatttctctagatttaagatgtctaggccattatcttatggaagaataatgagcccagcaaatgtttaaaaattaagaaaaaacctaaaaagtgctgatttctgcatttactcaacttactcaaaaaactgatatatttcatagaaatagaagtggaaaggttccagtagtttaacttatacatccataatcaatactatacatgaatacgtgggcaagaggttacaagattccaccatgaaaggtaacttgcagccctgaggaagaataaaccagttcatactttgggttgttctcaaattcacttgctgaattcaattctgtaggtttgttactgtaagattaatatatatacattccttccagcaattggaaattcccaacagacatacagtcattagtgacaagtaataaatatttgttttctttttattagtattattattatactttaagttttagggtacatgtgcacaacgtgcaggtttgttacatatgtatacatgtgccatgttgctgtgctgcacccattaactcgtcatttagcattaggtatgtctcctaatgctatccctcccccaccccacaacaggccccagtgtgtgatgttccccttcctgtgtccaagtgttctcattgttcaattcccacctatgagtaagaacatgcggtgtttggttttttgtccttgcgatagtttgctcagaatgatggtttccagcttcatctatgtccctacaaaggacatgaactcatcattttttatggctgcatagcattccacggtgtatatgtgccacattttcttaatccagtctatcattgttggacatttgggttggttccaagtctttgctattgtgaatagtgccacaataaacatacgtgtgcatgtgtctttatagcagcatgatttataatcctttgggtatatacccagtaatgggatggctgggtcaaacagtatttctagttctagatccctgaggaatcgccacactgacttccacaatggttgaactagtttacagtcccaccaacagtgtaaaagtgttcctatttctccacatcctctccagcacctgttgtttcctgactttttaatgattgccattctaactggtgtgagatggtatctcattgtggttttgatttgcagttctctgatggccagtgatgatgagcattttttcatgtgttttttggctgcataaatgtcttcttttgagaagtgtctgttcatatccttcacctgctttttgatggggttgtttttttcttgtaaatttgttggagttcactgtagattctggatattagccctttgtcaaatgagtaggttgcaaaaattttctcccattctgtaggttgcctgttcactctgatggtggtttcttttgctgtgcagaagctctttagtttaattagatcccatttgtcaatgttggcttttgttgccattgcttttggtgttttagatatgaagtccttgcccatgcctatgtcctgaatggtaatgcctaggttttcttctagggcttttatggttttaggtctaacatgtaagtctttaatccatctcgaattaatttttgtataaggtgtaaggaagggatccagtttcagctttctacatatggctagccagttttcccagcaccatttattaaatagggaatcctttccccattgcttgtttttgtcaggtttgtcaaagatcaggtagttgtagatattcatccctgggatgcaaggctggttcaacatacgaaaatcaataaacataatccagcatataaacagaaccaatgacaaaaatcacatgattatctcaatagatgcagaaaaggcctttgacaaaattcaacacccttcatgctaaaaactctcaataaattaggtattgatgggacatatctcaaaataataagagctatctatgacaaacccacagccaatatcatactgaatggacaaaaactggaagcattccctttgaaaactggcacaagacagggatgccctctcttaccactcctattcaacatagcgttggaagttctggccagggcaatcaggcaggagaaggaaataaagggcattcaattaggaaaagaagaagtcaaattgtccctgtttgcagatgacatgattgtgtatctagaaaaccccatcgtctcagcccaaaatctccttaagctgataagcaacttcagcaaagtctcaggatacaaaatcaatgtgcaaaaatcacaagcattcttatacaccaataacagacaaacagagagccaaatcatgagtgaactcccattcacaattgcttcaaagagaataaacttacaagggaatccaacttacaagggatgtgaaggacctcttcaaggagaactacaaaccactgctcaaggaaataaaagaggatacaaacaaatggaagaacattccatgctcatgggtaggaagaaacaatatcgtgaaaatggccatactgcccaaggtaatgtatagattcaatgccatccccatcaagctaccaatgactttcttcacagaattggaaaaaacaactttaaagtttatatggaaccaaaaaagagcccgcattgccaagtcaatcctaagccaaaagaacaaagctgcaggcatcacgctacctgacttcaaactatgctacaaggctacagtaaccaaaacagcatggtactggtaccaaaacagagatatagaccaatggaacagaacagagccctcagaaataaatatttgttttcttattcctagtagtgaccacgggatgggcacatgttaatggaagggaatgacagggtgtagatatcagctccagtcatagcctttcattgaccgcttctgacttctgtgtctttctccatcatccagacacttaccacttatcccatcacaaccctgtgcagccctcccaccatgtactggatgcttctacaaaaagaccttaagaggtacttgggcagaaatttccacttgaaccacaaatgatagctaccatccagcatcacagatctccctttttcagcacagggcagcccagactttctgagtcttaccactactgacattttgaaccaataattctgtgtcatcgagggggctgtcatatgcattacaggatattgagcagcatcccaagactctactcgatgccagtagcacctcctccccaccatctgcgacaatcaaaaatgtccctaggctgggcacagtggctcacacctgtaatcccgacactttggaagctgaggcgggcagatcacctgaggtcaggagttcaagaccagcctggccaacatggcaaaaccctgtctctactaaaaatacaaacattagccaggcgtggtggcacacaacgtgtaatcccagcctctttggaggctgaggcaggagaatcgcttgaacccggaaggtggaggttgcagtgagccaagatcgcgccactgcacttccagcctgggcaacagcgcaagactccatttccaaaaaaaaaaagtccctagacactgcctaatgtctcctggggggcaaaattgtcccctagtctacaaaccaccggaatatcctctaggacaactggacatttttccaggaacaaccagagctctatagtccccgaactccccctcaaaaaatttatcctctagtactactttttagaaacactgtcatttagaaccagccctcaaaaaagaaagaaaagcatatttatactgccttgaagagaagctaacaaagtttgacttgaaggttatattcagtttagccaaactacatgaacatccagtagagttacaatgtatatttgtttaattcaaactcaatacatgaggagagaaaggaagagaggagcaatttaagaagtgcaggcttgtccatcctcttttgccaacaaagtgtggatgcccaagagggaaagtgctatgcaagacagaataatgcaaatacaaatcttctctttccctagtcagtgtcaacgcctttggtcctatgtgagcatcttgctcacatttcaatagtaattcagggactattcaacgattattctgaatgcatatgatttgtattctacccacatcctctggttcatttggggcctcagtgtttgagaagcaagctgttctaggctttctcacctgtcttcagtaacgccagtggttaaaagctaagctcaaaatcaaacaggcagggccctactacttactaatagtgtggccttggacactcaagatatccttactaagcctccatcaactccatctataagagaggattaagagccacctcacaaggctgtggtgagaatttaatgtaagtgacttgcttggtgagatcaccttgacaagtgggaggtgcctggtacagagtatcatgagtatcaactcagccctttattatttggaaggccttgggcaagttctttaaactctctgagcctcaatgtcctcatgtgtaaagtaggggttgagaggagtctaagaatgcttctaaagcccttataacctagcaactgctcaatcagtattagctgttatatcatgtggcttgtaataagcacttagtatcattaatagcattttctcccaccttttaacatctttaatagctaagttctcctccatctgctaaaatgtaagctgtcagaaatttttgttataatcactaatgtgccccatatgcctagaacaatgtctaacaatacagtaggtgttcaacaagtttttgttgaatgaactttcctaagacttgcctctcctagcttctatgcttgctgcttgaatgtcctaattatcttgcagggaaagcactcaggttcctctcaaaaaggccccatgcaactctgtctctccagatataaattcaagaggctgcggcactgcttgacaggaggggaggccctcaccccggaggtgctggagcagtggagggcacaaactgggctggagctacatgagagctatggacagacggaagtggtatatttaaagggcaacatttatgtttagtatatttgggggcctttctgccccaggattttcaacctgagcccctgaagtgcctccatcccactctaaatttttacagtttcccagtatacctcatcttgccagtagttaccaaaacttgcaaactgctcagttaggttttgctaaaggggtgatgattattattccatcattcctgcctccccctcatgcaggagaaatctcaggggctttagcaggtgggtgaggctcagaactgagcagctcatctctccaactgtgctgggaagaatcatctgagagcctctgtggggaatttattccagggtgcacttaatggagtctaaggagtagttttcaaagtgaccagtggtccccaaaccagcaacatcagcatcatctgggaatttggtagaaatgcaaattcttggactccactccacacctaatgcattagaaactctgggatgaggcccataaatctgtgtttcaacaatgctccagaatctccaatttgattctaaagcacacccatgtttgagaactactggtctcaaatagtatatttcagaaggtgtgcttaaatactgggaaaatcagtccaaactgaatcttaagtttcattgtcatgatatagtttcagaaaatgaatttttgtctacttatgcaaagtttgtcctctcaatgggaataatttgtgccaatcagaaaggacaaaaaattaaaccaggctcaatggggaaagaatgcttcactatgatgtccaggtaggttgagaaaatatctgaccggttcaataaagcagaaagaacgttttacagttttctgctattcactgtacaactatttacaacctgctttcattttgtgaaaagaaaattttaagaaaatcaattgtttctttcattctagattatagatgaaaatggcaatgttctaccacctggcaaagaaggggaaattgccctcagactaaagtctacacagcccttctgtttcttctctgaatatgtgatatgaggatagaaagtgctagtcatgtcttaatacagactttggtccaaatttcatttccaccatgtcttgctatgtaacctcaggcaagcaacaaaatctatttcatcagcagtaaaatgcagagactatcacctatcacctgagtactataaagatgaaattccaaatgtaacaaactggttgcagtggttatcctcagaaaggaaaactggacagggtaggatgggggtgcagttggggggtgctagaggtggaagaggggctttttattatactatttgggaccttttatatcttatactaggaactaccttttttaaaaaattaatttccagccagggacagtggctcatactgtaattgcaacattttgggaggctgaggtgggagggtggcttgggcccaagagttcaagaccagcctgggaaacatagtgagaccccgtctctacaaaaacataaaacaattagccaggtgtggtggcacatgcctgtggtcccagctatccagaaggctgaggcgacaggattgctacagcctgggaggtcaaggctgcagtgagctatgatcaagccaatgcagtccagcatgggcaacagaaagagactctgtctcaaaatataaaataaataatttcctttagaagtacaatttgtaatgtacttgtcacttaatgagtgttatacccatttctgttctgaccaaactaatccccaaatgtcatctttgattcctaggacagtccagagaaaactgctgccacggtaaggggagatttttatgtcactggagacagaggaatgatggacagtgatgggtatttctggtttgtcggcagagctgatgatgtcattatttcctctgggtttgtagatttgccactcttaagaggcaaggattgacagggggggagctctcctactggaggatgtggtggtcaaaggcttcttttccttttcaggtaccgtattgggccatttgaagtggagagtgtgcttgctgagcatccagcagttgtcaaatcagctgttgtcagtagtccatatccaatttgtggagaggtagatgaatatcattaattaaagtagcaactttatatttttgagttctgtccatttgaccatggtaaaggctgaaccaaaagtggtcatttaattctcactatgaggcatgcatttggccaaaatataaaccaggcaaccaactttacaataagtcgtgtcccaaaggggagctattaggattcttttgaaggcaagtgacagaaactcaactcaaactgccttaagttaaaaaaaaaaaaaagacatttggctcatataaatgacaagtattcaagtacagccacatccaagggttcatgtaaggttggcaagtcttagtctctctccatttttggctctgctgttctttatgctggctccatttgagcaggttcttcctatttgatagcaatcaactccagacttacacaggttaacaatcctccacccctccaggaaaggacagagctctcttttcagtcatttcaagtaactctcaggactgcatttgcctaccttagatcacatctctcaccaatgtggttcagggaatgatatatgctgatcggccagacttggatcatatgtctatcattggaggtaggggttggtgtcaatcccaccagagaggatagggtaatactctataggaaaaactacagtagctactaaaaagggggaacagatactgcataagcatatgcagatttcactgaataggcagcagatttcactgaatggacaactgtcatggaactcagaatacattttctcacagaaacaaggcagatagaaaattgtggccagtttcccaaacaagtctcatgagcctgtttaggaccaatgggaaggaaactctggcaatgacaataatagtcttaattctaggaagaagcccaattttcctaatttcctttcctcatggaagtttcctacagacacagcaagtgacaaaatttcaaaagtttgtctctcagcatcctcccacatctgtacctccctctcacacaccagtgagcctctgcagtgacactatgggtcccctactcttacctcttataccccctccactcccatttattccattctcagaaatagtttcctcctgctgccatgttctcatcctctcaatataaatgatttcagctgaagagcagaagtaaccaccaattagaatcaatgaataatataaattatgcttactaacctcagtaattatctaattggtaggttttaaacagtattacaaagagaagcaaacaatatgaggcaaaaaacgaccttatagagatagatcaatctttcctgagagttttttgtttcattttgttttgttttgagatggagacttgctgtcacccaggcaaaaagcaggagtgcagtggtgcagttatagctcactgcaacctcaaactgctgggttcaagcatcctcccgcctcagcctcctgagtcgctaggactacacatgtgcattatcgtgccctggctaattttttctttttagtctttatagagatggggtctcactatgttgaccaggctggtttcaaactcctgagcttaaactatccttctaccttggcctcccaatgttgtgggattataggtgtaagccactacactcagccccttcctgagatttgatctcccaggatacacagtccttcctccattgagactcttcaaactcccttgaaaccacatattctctgggagctccatttgtccccctggtacatgcttctagtggtatagattcgaaggagtaagtggtcatctataaagcaaagactgcctgtgaaataaatgggatcactctgaaatgttaaatacatgtgtgacctgtaaatagaacttagctttcttgaaccgctgcactcctcatactcacaaaccatttacctggaattattctcaaaacctcactttgtaattgtatccaagctttgttcagaagcaatctctggcatttgcagtcatcactcaaactgctattaacaaacagtaagtacctatgttcagcattggttgcagatccttgatgtgtctgaaaaacagagcaagataaattatctgttgcaggtggtgaaagcttttgttgtcttagctccatcctgtaagtcctacagcctagagaaattaactcttgagcttcaggatcatgtgaaaaaaatcaactgcaccttacaaatatccaagaaagtaagtattttgtccaaaagttaagtttggatgttaccaaactaagacctaagctaaaatgtagattttactggattttgactttatagtagctcattatataggtagagggcacctttgtttagccctaagaacttgaaaatgttttgttagaacagtataaatgcattataaactagagcctttaatcaactctgcaatactgaatcactactaagattctttctagaaataatttgtcccattctgtataagaaaagcacagtggccaagaatggccaactgccttgtttttagggacagcacttgactcatctatcctaggactcttggccctaatacccatataaattcaaagaacatacctgtatgtatcaagggaccccattaatattcagaaagaatacccaaagaaaccatgaaatctttcctgaaactttcatcaaataaggatttaagaaaaatactatataaagacatgaagatggccctgtagtttccttctaaccatggaattggttgatactgactgatcctctgcatgaaatttctgttttagttagcatcatttcagtcaaaaggtagtaaatttcaacctaagaactattcaacaatttctccattacattcactaaattaatgaacttttgactttcagaaaggctatttgaggacattttaaaatacagtagtcgtcttattttgacagaagagaataaaaagaggatttttatggtcaagtcagggcagaaaactgtatatattccaaattatgcctaaaaaatcttctccaatctccagggtccagctctgcaaagacaagaactaagtgttctttttgcatttaggtgaagtctccactttctagaacagtagagacctaggactagtttgaactaggggaaagcaatggggtaaagggattattactttcttgtggcaaagcatttaagtgaatttgcactaaaaacccccaagatggagctacactgtcacccttcctgtacaaacagaacagtttctggtgtctatgagattcaataagcttaggctaagataatctagactttaaaattcagtctcagagtttcatgcaagctctctcctattgcactgacaattggaaaaacggaatcaaatgtctcataacgtttttccgtcaattaggtggaatttgttcaagaactcccaaagacaatcattgggagaatcaaacacgttttaagagaccaagaatagggacgaacatagcttgataaaaaagctgaagggttaagtagtaatatgattgctttctcgatttgttcctgataattcagtgactactctcttaaaatgtttaagatccttcctggtttaagtttttgttttctacttagctaaaaaattaaaaagtaaataaaagtctaaaaatatatggatgaaaattgtttcaataaccaaactgacaaaggtaatgatggtttctagtgtttaaaattgcaggagtcaaatgattacttagaaaaagaaagtgcacaatgaatctgtatttcatctatcttgtgcctgattaattcaaaataaagatatatcctaaatgttcaagacaatttcttctacttaacaactttatgagaccaaacttcaatatattaaaatactgttaaaatgagtataaataattcaaaaatcagtaagtgaatttaatgaaagtaagtactgtattactatggctcattttgaagcaaattaactgtaaaatatctgaaacttggatttagaagtattaattattcaagggtaataattttttaatgttttttaggctcatgtccatggcattttataatttgacatataaacatattttatgatatatatatactataaagcaagagatttactaagagtcagaaagaaagaaaaaatattagaacaccaatttttagggaacaaatttattttgatttttctgaaaatatcaggaactatgaaaaaacaagctcgatttctggccgtaccaaaagcaaaatacaagtaaaaataacatttgaaaaccaagtttaacctcagagaatcatgttttaaaatacaaagtttaacattctttcctctatggagctaaacaagttttctaaaccataagactgcagtttttttatttttttaactgacgtaattttttaaaagaaaaaacaaaaggggaataaaaagcacttcctaccctggaatcccgtcatttataaaataacatgctcaaatgtcagtgaaaataaacagttgataaacctgaaaacaagtcttttaatgagttcaggttacaaccgaacacaggattttgtaactgggaaagaacagcttgtgtaacaaccgattcttaccaaatacaaataaatataaaagacaatttaaaaacaaactgtataatcaaaatctttccgtaaaatagcagctttcacaaagtaaaaacaatttagttccacagagttgtatgctctgtaggcatatggccaattttcttccgagtccttttgtcttgcactatcaaaatagaatctttgtcttggagcaagtctgctgaagaaggcaccaaaatcctatcctccctattcccctaactgatattaataatcctcttatcaatcattgcaaggtaacttcaatgtcattaagtattaacattctaaatatgtaaagctatagaaggaaggtcctgcctattctctttgcccctctcaaatcattctagtctggtttaccaaacagaaccaccagctaggaggataaaaatacattcccatgttcactagccattaaatgaacatagccacttgtgcaggaagcctaacatttttaggatttcctaactttttaaaacttaaggataagtccatttctacaagctaattttacagctccttaatattcttaatctggacagttaattttgcagactttgttggtgtctgccttttcaattgttttacccaaaaagaggccttgaaaaaactttcaaattcaggaaacccctaaacccctgcagagaaccctcatggtatgtgagtgtgagcactaagttgaagaatactcttatttcacagaaatctaggactgtcagactagggctgagttcattctcttccttcagagacaaaatttcaagctgagcagattcagagacaagggttcctcataggttatatactagtgctgggaaaaggagagaaaatgctatttcattgggtcttgtggttcctccagccgggttagaacaagatttgagagttgcaccctttattttcaaggccaagtggctgcagaaacatttcaagaattcctctggcaaggtggcaagtcagtttccttttagatctaagagtcttgtcgctttaagaaaaatttttttccccagaacctttcagagacttgtccatttgttcatgtgatgaaaaacgtctgcaaaataggctactttctgtagtcatttttcatttccaaagcactcagcaaaagctggctgttttattgtaagtactctggcaattcacctttcaattcaaatatcctgtagagaacgcttcctctgagaagccactggatgtctgtatggtgcaggaggtttatgtgctgtctgtccaggtttttgttttgggtgtttttttttttttttaacatttttgcataaatgggtctttgatacaggtaaccagttttgtaacattattcagaacttcactgtatcttcaagtttttgatatcagcatctctgtggagaaagcagtgtgctataatgtcaacatcaggatttctttttttttttttaataacgcaaaatgacttatggagacaaccactgatggggcaccaggagtgtagataccagacctctggttatcagatatgatgtcacaacattatatattggcctttgttctggcaggctcctagcaatagaaaaagttttctttgaatttcatcatttacaaatcttacaaatgctacagcatgacaaatattagtgaaacctgttgactcatcatcctggatagagaagctgctacttttcagttaatgacacaaaaccttttttgcatcatatgacatatcatcagtaaatcaacttattgagaataaagtctcttcaactttgtactgcatcttgccccagcattttaatgttattagattctcaccaaccatgcatattttcctttcctgagataagttctgctactaaataatttgcttcttaaaccttttgactaaaggtgatttctgaacaaaagccttactgtttttgatagtccaaaagccatttgaaaataatgaatatcctttcttgtcaagtggctgtgatttattgttacaattgctagttttgtaagttgcatgtcacagacaatgcacaatgggacaggagagcttggactgagtccacataatacccttgagaagtagctttctttattaagacagaatttctttgtgtcccttgttgcactagtatactgaagtatactcagaagactgaagttcttcatcaccaaccttttcagaaatgtctgtagttctatgcctaaaatggttctcgtctctctcacatcttgccttccaaaattgcgacactggactgtcagctatattacacacaaatgttaaaaaaaaaaaaaaaaaacagacataaacaagaaaatcacaaaagtacaaaaacttcactaaacaattcacttctaacctacatgatccacatttttgcaatgtttacaacaaagtggcaggcagacagctgagctgtggcatgtaaaaactccttccttagaatgaaaacttccctctgattttctacttcacaggtagttcactcccttaagtcagctggcactgcagaagaggagcctgggagaggccaacatccccctcctatcctcccctctttgcaacagcagcacatgggtctgcctctacgtaataccataaaggctgaaagatccctaaaaaaactgttaacagggctgcgcaatcattgctcactactgtgagaacagcataatgcagcacacaaataaaaaactgtttttagtcacaatttaaggtggagccccagcaacatctcgtagagccccaggtgagaaacccacctccaacaccaaatgacttcctatgagaagtcattttcatttgacttggatccttctgtggcttgacttgcaagttcaggtttggctcctccctcatttaccacctgtggattagacgttggttttgtctgccccagctcctcagtattctctggtacctgctggttattttttccttctgctgtgttgttttggtctgatttgtccgcagattccagtttagcttctttcccatttccctgctttgagttaagctgtgacggatccttagggctcttcaccacctcctggagattgtattttctaaacaacatgtaatctttcacaacactcaggcaacagacagctttgatgatttctactaccactgtgtactgtggattggtgagatccactttattttctgaattgagggtgcacactattcctgtaacaaaaacagaaaaacacatagctgaggaggataccattacatctgatagatacaaaaaatcttttgtctctgtttcttgttaaaacaagacatacagtaatccactcttctatgtggacttcaaataatctgaacccttacaataaataaacacaaatgaaaccctacaacatttaataagaatttttttccaaacaaaattcaatttcgagttaaaaaagacttttatctaactaccagaaaatctcatatccgacatattgaaatcagttgatttaatactattttaagaacattttaatatatttgttctacactcaaaaatgtaagccttaaatctttaaaaagaaaaaaatccttaaaaaacaagtatttaccattgaatgcctatggaaaatcactaagagaaacatacctgccaattctctgataacttcttctctattcacatgactgttatttcgagatttgtacacaatctgaaatgtccctttgtttggagctttaaaccagggttccaaaaatgtttctgcatattttttcatatcttctaaaaaagccttgcatgtgcctgagatgggtaacattcgcaaaataactcgagtcttctttttcttggttttgtacatatcctggagaatatgatgcaccaatttctcaggctcttaagaaaaaaaaaaagttaagaagataatttctcagacatcttaaagatcgaactctaaaatgaattttcactggcaatgacataagttgacagaagaaattctcataatgaattttaaatgaatctacctagtcattctttccaaacagtatttcttcagtgcctaatacgtactataatgtatctaatatattttaacttttcatcattattactgcttgcactagaaatgactgtttaggtagacaccgttgttaacatttttgtgatgtcctgagttatccaaccgtaacaccatgctgttgttttcctgtaacaacagagtacattaaacagtacacacttttttacaaaaaaaaaaaaaaaaaattctgtgagtcactttaaaagatgtaattaatccattagctaagttagcacacaagtctaaatctcagacccaagaggaatcccagaaccatgctgggcacaacatcatgaaagggaggtcctcaggctgcaacttgcctacatacaagtatatttggggctgctccgaaaatttgtaaattagttgaccacactgaaaaacaaaaaaactccagatttcaaacttcttttgagaaattcaaatacctggccctgcattcccaaagagcaacaactggctggagctgagtagcagctgccccttatttacacagaactggcactctagttctgccttaagttatatacgaaggaagcagcaaagccaggtttccactcataagccaatgctacgtccaccaccccattctacctctccacaggccaactgctaatacagtgtacagaagctgccatcaaatgattaactgagtcatgcccaagaagccattttgtaagcagtattccctgagacaggaagatacccagatgttatgagatcgataatcttagcaagtatttgtcacacctatcccaagtgtcctgatgaagacaacgttatttgctccactttccactgactggaatcttcttaacctcatctctgtagatgccttaatgtcaccaacttctttcttcaaggcagcctccgcatcatcatcctctccctcacttccagagggctgctgatccttgtctgtaaactgtttgcataaaactaatgagcagaaatgacacaacagctcacatttaaacactataagtaattatttatgtgaagtccctggcggcaggtggctcagtattgattttttttttttttctaaagatggagtctcgctttgcctcccaggctggagtgcagtggtgcgatcttgacttgctgcaacctccgcctcctgggttcaaccaattttcctgcctcagcctcccaagtagctgtgattacaggcgcatgccactacacacagctaatttttgtatttttagtagagatggggtttcgccatgttggtcaggctggtcttaaactcctcaggtgatccactcgcctcagcctcccaaagtgctgggattacaggtgtgagctaccatgcccagctgactcagtattgataataaagctttttttacgaagctgggacaccacacccttcaaaacgtggagcaaggccggaagtggtggctcatgcccataatcccagcactctgggaggcagaggcaagcagatcacctgaggtcagaagttcgagaccagcctagccaacatggtgaaaccttgtctctactaaaaatacaaaaattagcccgatgtggtggcagacgcctgtaatcccagctactcaggaggctgaggcaggagaatcgcttgaacccagaaggcagatattgcagtgagctgagattgcaccactgcactccagcctgggtgacagagcaagactctgtctcaaaaaaattaaaaaaaaaaaaaaaatgtggaggaagagggaattcccgcagactatagaatgtaaaatttgaaaatgttttcaaaagcatcctgacagtttgaggcagagagaaacgtgctgaccagatcaatcattttagggtggaccttaacacgttgaccaggtatctgtgtgcctcacacgacactgtccttttggtgagattagaccaaatacctgtggaattaaaaacccttactcttgttctattaaggaacaaggcacagaaatacattgttcaataattttggccaagcatggtggctcatgcctgtaatcccagtactttagggggcagaggtgggcggatcccttgagcctaggaatttgacaccagcctggacaacatggcctgagaacccgtctctacaaaaaatacaaaaaattagtcgggcatggtggcacatgcctgcagtccctgctactcggggactgaggcaggaggactgcttcagccccggaggtggaagttgcagtgagcaagagcatgccactgtactccaacctccaccttgggtgacagagcaagaccgcttccaaaaaaagaatttgcttaaagtacaggagtagacaggatatgtgcttgttgcccagctctctgccccctagtgcccaacgaaattgccagtcaggcacaataataattgtatacatttacagaaactttattacataccagtatgtattttatgtacataagcaactcactagccagtcttaaagtattctcttttttatctagctcagcagcatcaaataatgtgcccatgtccgagtccccaagctagtagaggatgagccgtgaatttaaattccctctgtattacccttcttcatttaatccctcagtgtgcgtgtgtgtattggtccagattctaagccagtaatatgatttccaaacactaagactttaggtgatattggtaaaagtttttacgttctaaaatgtattttaagtgcagtaactagcattagtagtaaacctattatttcagaaatattattgcttcaggtaaacacattattactccaacttcacgaggctgtcatgaaaaatgtgtttctgaaagagcttcagcacaccgcctggccctcaatgagcaatccttaagtgggaggtaggccgggctcagtggctcgcgcctgtaatctcagcaccttgagaggcagagacgggaggatcgcttgagtgtagggtttaggactaccctgggccaaacagtgagaccccttatctacaatttacaaaacttagccgagagtggtggcgcgcactcatagtcccagctactctggaggctgagacaggagaagtcgaggcttccctgagctatcatcacgccactgcactccagcctcggcaacagagcgagaccctgtctcacaaaaataaaaataaaagtaatgggagctaccgtggttactgatggcaagaaaaggtgcaagcacttcaagcacaaaaccgatagcaccgaagtctgcgagcgtctcaggactagggacggaaacgccggcgaggccacgcccctacagccgtcacgccgacgacccgaggcgcgcatgcccataccagcagccatccctccacccttccctcctcccgcaaggcctggcagccggcccgcccgcccaccccgggaccggtaccttttctggcccatacatgtcgtcgccgtattcgttgaggaggctgtaggcctcctccacgcacttgcgctcgttcatattgcaggtgatgaggatgccctgtagcccgggctctagctgacggggcccgccagcgtcgcagcgccgagcgcgcttggccagcacatactgagccttgcctttgcgcttcccgccgccaggctgagtagtctgctgggcaggggccgccatggtgtgcgcaaactgagaggaaagagaaacgtttctccgctgctgttggcgtcctcgtctatcgccggcgcgaactggtgacgtcggatatgagcgacggcctcccctagccggcctcgaagcctcattccgtgctgcgccaggtcctaaggccggtctgcaatcgtgaaaggggtggagtgatacccgcccaagccccgcctcctgccccgcctcccgactgcaacctgaatccagtagaggcagcatagcagccattctggaagtggtgtcggtggctcctcaagcccttgaagctggctccagccatatagcttcttccacccaaccttggtacctgttcctccagccttccctataattctgccagctactgtggaggaaaagttaaatattaaatttgaactcaattgaacgtggacacaatggtcaagtcccgtaacaggttgcatgagccccttgaggcattcattcatccagcactgttacagataactctgtacctgtacttgagttattgaaaaacagacaatcacagaaacaagttgacctttatgtgttccttgagcccagtcgagaagggccctcgtgactgggcctcatgccaatcaacgcattacaaaaagagccagggtcggccgggcacggtggctcacgcctgtaatcccagcactttgggaggccaaggcaggcagatcacgaggtcaggagatggagaccatcctgaccaacatctctactaaaatgcaaaaaattagccaggcgtggtggcgcgcacctgtagtcccaactactcgggaggctgaggcaggggaatcactcgaactcgggaagcggcggttgcagtaagccgagatcgtgccattgcactccagcctggcaacaaagcgaggctctgtctcaaaaaaaaaaaaaaaatgagccagggtcccaggccacacggaagcttcttgagacccctcctcctctgtgcacggacaagtggctgactctggagcccaggctgttgcttcccggtctggtgatgaatccaacatagtctggtgcgtgtaaatatatatatatatatatatattttttttttttcccttctccccttcccattgcaatttgcttactatatcatttgcttattatatctgcattgccatttacgtgggataaaggttgtttacccccaaaggtattgtatgtttgtctattttttttttttttttttgagatggagtctcgctctgtcgcccaggctggagtgcagtggtgcgatctgggctcactgcaagctccgcctcccaggttcaccccattctcctgcctccctcccgagtagctgggactacaggcgcccgccaccacgcccggctaatattttttatttttagtagagacggggttttaccgtgtcagtcaggatggtctcaatctcctgacctcgtgatccacccgcctcggcctcccaaagtgctgagattacaggcgtgagccaccgcgcctggccgtattttgtcttgttttttcccctcgcgcatttcccacatagaacagttactcaaaaggcttccagtaaattccatttcagcctcaattttccaggctatgtttctatttcacttaaaaccaaggatgttggctggtgttgtttcatgctgctttcgttgcggccttttatccatagtcttggcaacttatcatgttactgtctttttaaaaatcattgaagatgccacttttgaagaatgtgtttaaaaaacaagtgcttctcatactactcttcaggtacaaacctcttagcagatttgagttcctacaaagccctaaaagatgtaatctgatattttgaaagggacaccgaattcacagtcaataaaccctaggttctaaccccagatctaccactatgtccaaaaattttatcatcttattgtttgcttttacctgtgtattcaatacagcatttaattttcagaatttctttggtggacactgcacagcagagatttctagaagtcctcagttgtttgtgaagagcagtgtcatgacactggcattggccttcccccaaatctctctctcttctgctggctgggtttcagttgcccacactctgccacctgtccttaggatatcaaatattagcatacagataacaagttaaaatatatatatttcaagtcccaagcatatttgagtactatatggaggcaaacttgaaaaacaaaaactcagttttgttaaaatatgtgaggaggcagctttaggctaaatttaagtttggcctaaatcaagcttgtccaacctgttggcccacagtcaacatgtggcccaggacagctttgaaattcaaccggcccaacacaaattaataaactttcttaaaacactctgaggtttttctgcaattaaaaaaaattcatctgctattgttagcattagtatattttatgggtggcccaagaggattcttcttccaaggaagccaaaagattggacatccctggcctacaggtttctccatacatagtgaactataacctaattggatgtgtaaacagactgtaatggctgttgtaacaagtagccaaatctcagccaagcacagaagccatgctcaaccactcacaggtggctgattgttcaaaccatgttttttatttttatgttttttgagacggagtcttgctgtcgcacaggatggagtgcactggtgcagtctcggctcactgcaacgtccacttactgggttcaagcgattctcctgcctcagcctcccaagtagctgggattacctgtgcatgccaccacggccaactaatttttgtatttttagtagatatggggtttcaccatgttggccaggctgatcttgaactcctgacctcaagagatctgcccacttcgcctcccaaagtgctgggattacaggcatgagccactgcgcccagccaaaccacgtttaaataaggcaaatactgagttgtaacctattgggctgtttctgtaccttacttccatttcctgcacctcacttttctttttatgtccataaatcatctctgaccatgtggcagcaccaggatgtctctaaacctattccggttagtgggtcaggggcctgcctgatttgagaatccttccttgtgcaatttaattctgttaaatttaatttgtctaaagttttttaacagtttattgtatttcatggttgctgactgtgcagagaatatccaatgaagtgagaaaaatatgcaaccctgtagctctcagtctagacgttagttatctaaatcacacactcatcctgtggcagctgccggggctgcgtccacttacttcctcttctgaaacaggccctcgtccagctctaaataactcagccttcatttattccttattattcttctttgttcttttttgcttattctttagactacatctattatttcatggctgtgtgaactttcacctccttaggttacctcccagacatggacaatggcccagtgtctatccttagacaccagggactctgtcgcttgaaaacctctcttagaagggaccacttggggccaggcacggtggctcacgcttgtaatcccagcactttgggaggccaaggagggtagatcacttgaggccagttcaagaccagactgggtaacatggcaaaaccccatctctactaaaaataaaaaaattagttgggcatggtggtgcatgcctgtaatcccagctatttgggaggctagacacgagagttgcttgaacctgggaggcagaggttgcagtgagctgaaatcgtgccactgcactccagcctgggcaaaatagactctgtctcaaaataaataaataaataaataaataaataaatagagaccacttggcaccttgtggcaccatctagagtagattaaggtgatctgaggatgttaccttttgttttaattaacctatttgcttcagatattcagaaggcctcacagccaagcaaggggggaatggtgtgacacattctagattccctttctgtttctcttcctaaccttcaaagttactgtccctgaagttctacttgtatgttcagtacagaacccaggtaggagatgctcttagacactcctcgtgttctgaccttgctccccatccacacttcctgccttagtctcttgttacccagcatcttcagggaatggatatcctggctgtgaatcccagtctccttctgacttgattcccaatatctgctgccttcagagtaggtatcaagtacgattaaaagcccaggttctaaagccaaaccaagttcaaattctgctttggccatgacctggctgtgaaactctgagtaagttacccaagccaaggtttagattccctgttagatttaaaaataataataatggaaataataatactcacatcatgggttattaggaaaatccagtaagatcagtcatgacaagtgcttagctctcagccactgttcagtcaacatgtgcttaaaaacagctgctttcagactcagtcgtgaatcatggaagcctgtttttttctttttgatgtaagtatccatccctcagtctgatcacctaacctcattatttgtctattattctctaatttaatggttcttttatatttttggtttactaaaagctgttgaatccttttacttaggagactaaaaggggttttattttattgttctatagacctcctctgtggaaaaggggaatttaaaagtatatatagcgtaaagtaaaataacataaaatgcgtaagactggcatgccttacctctgccagctggtttctgcctcacatttgattgaatgacatcccacctttcactagctttgtagcctcactggcagcacttgtcacatttgtgctttcattacacccagacgctgtgtgagaaactcacccaacagcctgatcacccaggctggaacccaattttaaaccaatgtgaacttgagtctgcccctagaggagtcaaatttggcctggcctttgtacctactcagccctgctgagtgtcctatactgatccccatcacctctaattcatttcattccaccagtgcctgggtcccagttttgacagatatgtttctctatggcaaacttggcactttgagggcctatgttcttaagggcaaaagtcattaaatctctttccctccaattttatctttcaattttatactctaaacatacaagtctttcttcttaaacttttcctggtgttttgtgggtacttccttcccactcctttgagatttggttgaataatctatgttccaaagtaattgttttgaagcaggagatataaaaaaaaaaacaagttttcttggaggctgactcactgcaaggcccagcgatagacagggctctggaagggctttgataacactatctgcagagccagggccctcaagggatgggttccagagcctctccctgccatcccagagcagggatgagaaaaacaagtttttcttctctttcagcttccgccttcccccttatcattctcataattattttgcaaagttttataagttcctgtttttcccttctgtacagcatggcaaggtcacaagatatgcttcagttgcaaaacctgtcactgtttaacaaactgcctttgttctgcttctgtaagctgcttacccaccctacaggtttcacaccatcaaactggccaaccccctttcaaattcatgtataaaagtcaagccctgtctttgttcagggctcagcctttgggtgttaatccgctgggctggtgctcacctaataaaatcctcctgtcccacccattggtctctcctgtcccttaattcctgcaacagttttattatttagttttacttctttgagcacttctagatcatccgcctgcttcttactttcacttcagtcaatgctccaaagaatgaatcaccaatggtggcatctcagtttaataagttacagaaagataattccatttaccactcaaatcatgctatggactgcatattccaccaatgcagaacactagtcttgagtaaaacactgatataagaaatataaatttcagggtaggtatagtgtacatgtaagagtctagctgggcatgatggctcacgcctgtaatcctagcattttgggcagccaaggcaggtggatcgcttgagctcaggagttccagaccaacctgggcaacatggtgaagccccatctttacaaaaactacaaaacttaggtgtggtggtgcacacctgtggtcccagctacttggggggctgaggtgggaggatcgtttgagcccaggaggtcaaggctgcagtgagccatgatctgaccactgtactccagcctggggggacaaaatgagaccatgtctcaaaaaataaataaataaataaatagatagataaataaataaataaacaaagagtctagggtaactggagtttagaggttctttcagtacaaataaggcctaaataagaattatctacatgaatactcaggttgaataatttatatttaaatgaaaaattgaagggaagccacatcctcagtaagagtacagcattcaatgtatagatgaacaaagacaaattgattaagaatatattttaggggtcacaccatcctgagtttaaatactgagtccaccacattgctagttctgtgaccttggggaagttaattgttctaatcctcatgttcctcatcagtaaaatgagaatagccacagcatctatcttaaaagtcattgtgagtattgaataaaatattcatgtcagttgcacatacaaatattcaataagtgttcactgctgctgttttgttgtagctgttgctaactggaacgtttggtagagataatttttaccaaaaaagttgaggttgagactcaggctttttgtgttggtcagtttgctttgatgtgtttccagccacttcttgctggttctcagtaccccagagataacctattatatctaaacatgttaatatgaaaagctctggctggaggcagtggctcacacttgtaatcccagcactttgggaggccgaggcagacagatcacttgaggtcaggagttcgagactagcctggccaacatggtgaaaccccatctctactaaaaatacaaaaatcagccatgtgtggttgtgggcacttgtaaccccagctactcgggaggctgaagtagaagaatcatttgaacccaggaaatggaggttcaatgagccataatcgcactctatgagccattgcactctagcctgggtgacaagagcgaaactccgtctccacaaaaaaagaaaaaagaaaagattttcaaagtgagatatgtgtaatatgaactaacttatgttttaaaggggaatatctatatatctatgtgcacatagatatacacatatgtatatatatgtgtgttatattttaatcctatatatatatgaaaatgatggttaataagacctactgtttttccacatttcccaactaaagcccaaagataagaatgaagagacactaaacctctgatttttgcattctaaagagaattgtcaacaaggactaagtgaagcatctctctccaggtttgtgaaaaggtaactctactggctctgctacctctgaccaatttcccagcctcaccatcctgcttctcagcttatgttagaagcctgggaaaggggagaagagtattttcaccccctttgctgtcagggttaccaagggaatcccctgtgaaggtgagaggtggttctaagaagagactggcatcacattccttggttgatattcccctctgcctggctgagtgagaaactgagccagaaagagaagtagagacagatggcaaggcagagacagtagagcaggggtggaggacagcagaggagaagcctgaagcataagatagggtgttgcaagtatatgtgcatatctggtacatcaaatggatcttcagaagttgcctgggcttgaccaggtagacccaacagacagaggatgaaagtcacacccagcatagtaagccctctaactccaatcttgtttcctcgccctcaacaatggaggctccagagtgtaaaagaaggagaagggaaaggtgtcagtgacaaataaggccatgtgtctctattccaggtgtcagagccagaggagaagagtggacaacccaactgcccaccacaggtccctagaagtacaggtcaagcctatgctggggagaggcaaacaggtacaacatacactgggtttgagatttaaatttctgagtggaccaacttttaaaaactgaaagtgattgtgaaattgtggaatcattccaaaaggtcattacattaagggataataaagggggaaaacaaaaattgggggaaaaagtgttaagacttgattggaaaactagttacatatatctatcccacttactcccttgagactactctttattttatatcaatctgtatcttttattataaccatatgcgtgtattatttttatatgttaaaatagtgttatttcttgatgtagatgcttaccaaagtatttctcttttcttctgggtcctcagattggctaatttctcaggtccctggaagtgagggtgaggctattgaaatgtgggcagaagtgatacatgctacttctaggcctaaattcatgagatccttcataaatgcatttctcttcccctaaacacccccctctctctcgtttcttgtcagctatctgatttcagaggatccaaccaggactcaggcttaggggagagcggggcctctgaatataaggatcctgagtctactacttaaagtgacagccacctaggaaaatccattaagcaaaaaattctgcatcagacttaagcctctgagctttagatttgtttatttctgcagcctagcctagcacaccttgactaatacactgggaatccagagtttgttcagaatgtcttcactattcttgttacaactttattgtccatagagattataaacactgtgcttcagacaaattaagagagcaagaggcctcataatgtagtagagagaatataagttttggagtcaggttttttttttttttttttgaaacggagtcttactctgttgcccagactggagtgcagtggtgcaatcttggctcactgcaacctctgcctcacaggttcaagcaattctcctacattagccacccaagtagctgggattacaggctcacaccaccatgactggctaatttttgtatttttagaatcagggtttcactatggtggccaggttggtctcaaaatccgtctgcctcagtctcccaaagtgctgggattacaggcgtgagccactgtgcccagttggtgtcagattttggtagaaagcctagatctgttattttcttggtagaatcagtggaaaatcctgaaccagtggccagccttctgtatttctgctagaacaccatgaaaaacctcttcccccttccttacaaaatgtacatgaaacagaattcaaggtcttctatctgtatgtaacttacaaaatagttgacagttctataaagctttgtcctttttcctgtttcttgtttccctgtagaactatttataaaaatgtttttctttttaaaggattttttattgttgtttaaagtatttgaaaaaaaattcataacttcaagctattttacatttaagaaaagatgtagtcaaacttggctgatgagagatagaaacccaggagaaactgggaaaatattccaggtgccttttttccccattttgactgacttatgccaattctataaaacactgctcatcatccccctgccaagtgatagtagagctcagtggggctcggagaagccctgccattcttcctctgcttagctgtaccagagctggtctatgtgggagccagggtctcttgggaagaaaaggaatggaaagatggggtttcattacacatcggttatgtcaccttggcttctccattcttcttcccttgggggttttatgagaaggcaaaaatcacatttaagggatatattgacatgttcattgtcaaaatctttgctccagccaaactgattctaggtatagtcaaacaacttggcattaaaacaaaaggacattaaccttctgtcagaatcactttcaagctgtgacttatttcaaggttgttttctctctactagacttcgtttcctcacattaaaaaaaatggatatatagtactacttagcttacagagctgctatgagaaataaatgatatgagctatctaaaacacttggcatacagaaaacattcaacaagtgaggctgaggcaggagaatggtgtgaacccgggaggcagagcttgcagttagccgagactgcaccactactctccagcctgggcgacagagcgagactctgtctcacaaaaaaaaaaagtggtcattctcttctactcagccaggcatggtagctcacacctgtaatctcagcattctgggaggccaaggccagaggatcacttgagcccagggttttaagaccaacctgggcaacatagtgagactctgtctctcaaaaaaaaaaattcacttctgctccgtataaggaatggtcccaaccctagttgctgttccttgccattgtttttcttgtggttgtctcatgataaaagaaaacagttgatggaaaatgatatgttagaagactctctcaaaagcctggtcttggctgggaactacatttatttattagagtttttcttaagacagttgaatataagaattattccaatcacttatgtcggaatccttcttagataaagcctcagtggcactaggttactccctaggattaaaactgggtaggggtcgagggagattagatttcagttgagtgctagagaagaaaacctgatctatttttagagaaaatggagatccctatgaaataatagatatagataacaattatcaatagctgcattaggtgaaaagctgctggaaacataatgaatggatcaggtgatgccttaacatcacaaaaggagagccaacacaacattatgattctccagatgtgatgcaatagaattctgcaaagatatttatgcaatctttttgctataaatggatctatcctctagatttaactattagtttatagaaactacacgggacagaaaaatatgttaaactcaaccacattgaattagcaaaatcaacactgaatttgggaaactttagaggacaatgccgtatgttctacaatgaattacaaagaaaaagaagagagagatggaatttatagattaaaaacttaagatatatatcaataaaatgcaatgtgttgcccttgtttggacactgagttgaaaaaaaaaaacaaatgtaaaacaaaattgaatctggaaaaggctggctgggtggggtggctcatacctgtaatcccagcactttgggagccgaggtgggcagatcacctgagatcaggagtttgagaccagcccggccaacatggtgaaaccccgtctctactaaaaatacaaaaattagccaggcatggtggcacatgcctgtaatcccagctacttgggaggctaaggcacagaaattgcttgaacctgggaggcagaggttgcaatgagctgagattgcaccactgcactccagcctgggtgacagaacgagactgtctccaaaaaaaaaaaaaaaaaagagtgaatctggaaacatgaaatttgaaaaattatattaatagaggattattatggctttttcaggtattaaatggtattgtgattaggttttaaaagagtccttatcttttagagatacataaggattttccacaataaggaagaaaaagagagaccaagagaagaggtacagatatacagacagagaataaagaagtaaaagctgcagatacagacaactatttttgagaaattttgctgtaaaaaggagacaagtaatgaagaggtggagggagacaaatggcccaagaaattttattttcacatgggaaatattaccatgtatttgtgcctgactttgtttccctattacaactcttaagaaagaaatgaaaagaagaaagagaaagaaaagagagagagagaaagaaagaaagaaaagaatgaaagaaagaaaaaaaagacagagaaagaaagaaattgatgatgcaagagagaggaagaataactgagggagtaatatcctggagtaagggagagggaatggtgtcaagtccacagtggaaaaggtgacccacgctaggaccttggacaatttttccatggtcattggaaggaatgcagaaagtatgggcagagttgtaagagtactggttggttaactggttagggggaataaggacattctcttctggcttttctcacttataaatctcagtgaaataagaggggagaaggagaggtactagtttagagaaacaggggaaggagtgaaacagttatctccaagtgtagaaatgtagtggggttgtcagagagtgagaacggcccacatgaatattttgcagtcaggaagttaaagtgtgctaacataattaaataggaggccattagactgaggtggctctaacactcagggttcccacataagcaaactgaagcctaactcagaatttaaaataaaatgaaatataagctcagccagtcacaggcagccaactgggctttagtatattgtcttgaacttcccaccagaacagtgcaaataaggcaattgttcaaacctttaccaatcaagtaatttctttgctcagcttccacattcaccctataaacaccctccctttgtgccctgcaatagagccctgaattacttcccatttggagctgcctgattcatggatcagtttgctcacatgtatgctttaaaattttaatgtgccttagtctatcttgtaacaagtgtaaccattgagtttaggaccaccaacaaataccatgtgcaattctccagagccatattaagcttctcaagtgtcacaaataagtagaattatctggagttttgcatagagctgggttttcccacatgagtatggtggagggagagcagtacaaagaatctgaatggcacagagaatccaagctgggcagaagataagtgaaggcatgaaggaggtgtgcttaagtcaatggacttaagattttagaggggcagaggaattattgtgacgaaggctggggatggtgtgagagaaggccaagcagggaacaggccagtgtccatagagaccatgtcgggagctggaactctagtccccacccaacaataagaagaagctccttgcaactcaggtgtcatccaaagctgggtaaagaacctagatgtctatattcacctggcaataatgaggtggtgccccttccctgtcccctacctgggcagtgtcaaagccagctaaaatataaagtttaaataaggtgcagagtcttattacaagaatgtctgtgtttgaattgaaaatcactcctcataccaaaaccaggaagagttcaaatgaatgaagaaagatgatggatagatgctaacactgagatgacagaaatgttagaatcatctgacaaagattttaaagtagccttgataaaaatgcttcagtgaacaattaggtatgcttgaaataaatgaaaaaaatatatatcagcaaaaaatagaagatatcaagaacaactaaatgaaaataaatattagaactaaaaaattcaatgagaaatcaaaagcttggtggatggtatgatactataaaatatatatttcatcttcattccagtttcctggtacatagccgctaaaacccctggaatttctgaagtggtaagtgctttttattattattattattattattatactttaagttttagggtacatgtgcacaatgtgcaggttagttacatatgtatacatgtgccatgctggtgtgttgcacccattaactcatcatttagcattaggtatatctcctaatgctatccctcccccccccccaccccacagcagtccccagagtgtgatgttccccttcctgtgtccatgtgttctcattgttcaattcccacctatgagtgagaacatgcggtgtttggttttttgtccttgcgatagtttactgagaatgatgacttccaatttcatccgtgtccctacaaaggacatgaactcatcattttttatggctgcatagtattccatggtatatatgtaccacattttcttaatccagtctgtcattgttggacatttggattggttccaagtctttgctattgtgaatagtgccgcagtaaacatacgtgtgcatgtgtctttatagcagcatgatttatggtcctttgggtatatacccagtaatgggatggctgggtcaaatggtatttctagttctagatccctgaggaatcgccacactgacttccacaatggttgaactagtttacagtcccaccaacagtgtaaaagtgttcctatttctccacatcctctccagcacctgttatttcctgactttttaatgattgccattctaactggtgtgagatggtatctcattgtggttttgatttgcatttctctgatggccagtgatgatgagcattttttcatgtgtcttttggctgcataaatgtcttcttttgagaagtgtctgttcatatcctttgcccactttttgatggggttgtttgtttttttcttgtaaatctgtttgagttcattgtagattctggatattagccctttgtcagatgagtaggttgcgaaaattttctcccattttgtaagttgccttttcactctgatggtagtttcttttgctgtgcagaagctctttagtttaattagatcccatttgtcaatgttggcttttgttgccattgcttttggtgttttagacatgaaatccttgcccatgcctatgtcctgaatggtaatgcctaggttttcttctagggtttttatgggtttaggtctaacgtttaagtctttaatccaacttgaattaatttttgtataatgtgtaaggaagggatccagtttcagctttctacatatggctagccagttttcccagcaccatttattaaatagggaatcctttccccattgcttgtttttctcaggtttgtcaaagatcagatagttgtacatatgcggcgttatttctgagggctctgttctgttccattgatctatatctctgttttggtaccagtaccatgctgttttggttactgtagccttgtagtatagtttgaagtcaggtagcgtgatgcctccagctttgttcttttggcttaggattgacttggtgatgcgggctcttttttggttccatatgaactttaaagtagttttttccaattctgtgcagaaagtcactggtagcttgatggggatggcattgaatctatacattaccttgggcagtatggccattttcacaatattgattcttcctacccatgagcatggaatgttcttccatttgtttgtatcctcttttatttccttgagcagtggtttgtagttctccttgaagaggtccttcacgtcccttgtaagttggattcctaagtattttattctctttgaagcaattgtgaatgggagttcactcatgatttggctctctgtttgtctattattggtgtataagaatgcttgtgatttttgcacattgattttgtatcctgagactttgctgaagttgcttatcagcttaaggagattttgggctgagacagtggggttttctagatatacaatcatgtcgtctgcaaacagggacaatttgacttcctcttttcctaattgaataccctttatttccttctcctgcctaattgccctggccagaacttccaacactatgttgaataggagtggtgagagagggcatccctgtcttgtgccagttttcaaagggaatgcttccagtttttgcccattcagtatgatactggctgtgggtttgtcatagatagctcttattattttgagatacgtcccatcaatacctaatttattgagagtttttagcatgaaggttgttgaattttgtcaaaggccttttctgcatctattgagataatcatgtggtttttgtctttggttctgtttatatgctggattatatttattgatttgcatatactgaaccatccttgcatcccagggatgaagcccacttgatcatggtggataagctttttgatgtgctgctggattcggtttgccagtattttattgaggatttttgcatcaatgttcatcaaggatattggtctaaaattctcttttttggttgtgtctctgcccggctttggtatcaggatgatgttggcctcataaaatgagttagggaggattccctctttttctattgttggaatagtttcagaaggaatggtaccagttcctccttgtacctctggtagaattcggctgtgaatccatctggtcctggattctttttggttggtaagctattgattattgccacaatttcagatcctgttattggtctattcagagattcaacttcttcctggtttagccttcggagagtgtatgtgtcgaggaatttctccatttcttctagattttctagtttatttgcgtagaggtgtttgtagtattctctgatggtagtttgtatttctgtgggatcggtggtgatatcccctttatcattttttattgtgtctatttgattcttctctctttttttattagtcttgctagcggtctatcaattttgttgatcctttcaaaaaaccagctcctggattcattaattttttgaagggtcttttgtgtctctatttccttcagttctgctcgattttagttatttcttgccttctgctagcttttgaatgtgtttgctcttgcttttctagttcttttaattgtgatgttagggtgtcaattttggatctttcctgctttctcttgtgggcatttagtgctataaatttccctctacacactgctttgaatgtgtcccagagattctggtatgttgtgtttttgttctcgttggtttcaaagaacatctttatttctgccttcatttcattatgtacccagtagtcattcaggagcaggttgttcagtttccatgtagttgagcggttttgagtgagtttcttaatcctgagttctagtttgattgcactgtggtctgagagacagtttgttataatttctgttcttttacatttgctgaagagagcttttttgtatgctagtgagatgactaggggttaggggttcaggatgagggctggttgccaggagaaccaaccttgtgattagagggttagaactttctctcccaccccaccaccacgccacttcccatccccctacctcttgggaggaaagaagggctgaaggttgagttaattaccaatgaccaatgatttaatcagtcaggcctgtgtaatgaagcctctaagaaacccaaaaggggctgggtgtggtggctcacgcctgtaatcccagcactttgggaggctgaggtgggcggatcatgaggtcaggagatcgagaccatcttggctaacacacggtgaaaccccgtctctactaaaaatacaaaaaaattagccaagtgtggtggtgggcacctgtagtcccagctactcaggaggctgaggcaggagaatggtgtaaacctgggaggtggagcttgcagtgagccgagatcacgccactgcactccagcctgggtgacacagcaagactccatctcaaaaaaaaaaaaaaaaaaagggctgggttcagggagcttctgggtagatgagcatgaggaagttctaggagggtagaacatctggtgaggacatggaagctctgtaccccttctcccacacctcgccctatgcatctctttaatctggctgttcatctgtatcctttgtaatatcctttataataaatgggttgatgtaagtgttgccctttgttctatgaatagttctagcaaattaattgaactcaaggagaggggttagaagtacagattacaaccttgaatcttatgacacttgaagtggggggcagtcttgtgggacttgtaaatcaaaaataaaattctaagcccccaaactgactgaattgaccctccttttgaccaagaggacccaaggaaatctgaaaaattaggccatgatggaaagccagtaggggcagctacagggggtggcggggacagacatgcctcattatactcttcccttttggagttcaagcacaactgaccaacattaacattgaaacagtgatcttaaaactgacaaaacagactctttgtagcaataagatccaaattctaaaatgactctagtacagcatcatataacagatagcaggccctgaagaaaatcaaagtcttttaccccaaaatatatttctttgacacattttgaaatggccctgcaaagctgtctcttgtggggaaaagctgcattctgtaggaaaatctccttcctttgttgcgggacaatcaaagactggagagactgaaaaaggttcaggagagtttattaaggtgatcacaggctcagccagacatacatccagaaagtctgagccccaaactaaaggctttcctacttttaaacatcttaaggcaggaaccatgtgaggcaggaagtaagttacggaagagagaaacaaaggcagttaatcaagcattacaacatttcttacatcttgagaaaaacatgtcttccaacctaaacttatcggtcttgtgaccctgaagccatgctagggaggtaagcaggaactcactgagcctgtaataaactttgatgaatgtggagttggggaatatagataaggtccactgaccacagagagaagacaggctgttaatattctcttttaacttaagtataactcaagttaaagttgcagcaactttaagaggatttaaaaatttctgttaccactactattaggttatagttgatttcattaattccttcttcatctttactatgtatttccagagagtgtgataccttttaacgtctaataagagacattcacaagtgttctctttgaggcctgctacctggaggcttcatctacttgaaaagaaccttggcttccgcaaccccccaccctttaccttaactcaagctgatttcaattcttcagccagagtttagccctttcaaccaattgccaatcaggagatctttaaatccacctattacctgaaagcccagcctcttcctcctttgagatgtcccaactttccaggctgaaccaatgtatacacatttttttttttttgagacggagtctcactctgtcgcccaggctggagtgcccaggctggagtgcagtggcatgatctcagctcactgcaacctccacctcccaggtttgagcaatttttctgcctcagcctcctcagcatgtattgatttatgtctttgcctataacttctttgtccctaaaatgtatcaaatcaaactgtaacccaatcaccttgggcacatgttctcaggacctcctaaagctgtgtcatgggtcatgatccttaaccatggcaaaataaacctctaaattaattgagacctgtctcagatactttttagtttacagattgagaccttaacctgtaggatctgacactatttccaggtagacagtgttgaactaagtaggacatgacacccaagctggtgtccactggagaattgcttggtatagtgaaaaccccccacacgtctagtgtcagaagtgttattgttagagtaggtagtcaggcagatatgggcaaggcaggaaaggcaggaatgtcaggcgacaatcaggtgatggtcaggcggttattaaactgtcactctaaaataattggttgcagtaggtgccagggaaaggcagtctcctaagagatagaaaacacctaaagctggtgatcagcagctttccaataagatctcaggaactgggcaagtgtgctcaagcatgcgtactaagaggcaaaatggcagattttaactggtatacaaccttcctctaggaacacttgactggtaagggaaaaacgcctcaaatgagaatgtgcacaacttcagtaaagacattgcacatgtggcccctcccaagtgctgacaggccactgcacgtgcagacagcccatgccaaggaaaaaatcaaaggagatacaaaacctcggaagcatgccaatgtataaaacgcaaagtcaaaagtcaaacagggcacctggatctctcaagttgcctgcttgcccctcttcctttggttcctgctctaaaactttctaataaactctcactcctgctcaaaaacttgcctcagtctctcactctgccttatgcctcttggatgaattctttcctttgaagaggcaagaatcaagttattgtagatccgtatggattcaccactgctaacattatgctgaatggtatgtgagagtagaaaaaaaaacactgttttttccctgtctctaataatgagcttaacatcagaatagaaataatagaagaaaaaaatcaaagaactggaagccagaatttactcaacctgaacaaaagaaagaaactagaatgggaaaaaaaagaaaaaaaagaacagagcctcagggacctgtgaaactatcataaaagatctaacatgggggctaaaaatttactccaagaaataatagctgaaaagttctcaaatttgtcaagagacataactatagaattcagcaatacagaaaaagaaatatacaacaggaccaagcaaggtttattccagggaggcaaggctggttcaatattagaagatcagtgtaatctatcttattaacaggctaaagaagaaaaacaccacatgcttatagtaactgatgcagaaaaaacacttgccaaaattcaacacctattcatgataaaaacactcagaaaaaaatagaaatagaggagaatttcctcaacttgataaagggcatctacacaaaacctactactaatattgtacctaaccatgaaagactgaatgttttccctctaagatcaaaagcaaggcaaggatgtctgctctcatcactcttattcaacgtagagctagacactctagcctgcgcaataaggcaagaaaaggaaataaaacgcatatagatctgaaagaaagaagtaagatctgtttacttatttacaggtaatgtgattacacagaaaatcccaaggaatcaacaacaaaagactcctagaactcaaaagtgaccaacaaattcctctttaagtaaagttgggtctctcacatgtaattgaaagagtcctttatttattcacatatccatcaactatttattgaatgcctaaaatttgccagtagctattccaggcaatagatacaccatcaaacaaaaagagttcttaccctcaagggtgatagtaagagatgtaaaaagttaaaaaatggtaaaagagaaaaaatgaagagtgctactttagaaaatgaggtaagggaagagttatttaataagacacctcagaaaatgaggaatttggccagggggatatctgaggaaagagttccagtcagtggaaactgtgaattcagaaagcctgaggctgaaacaggcaagtgtgtttgagaaaaagcaaggaggccggtggctgtgcagagtgaggcagaggaaggagaatgggctgtggatcagaggaccctgtgccagatcatacaactccttgcagttcatgtaaggactcggattttacctggagtggaaaaagaagcactgaaagatttgagcaggggagtaacctgatagcgtttatgtttagtcctgccacttcgacagataaacgcaccaatgggcttgatgagatttaggccaacccataaccgcccctcaacttctttcctttcaatttcaaaactcctctatggcttcctccatctgttcttccttctgagaagtgctctctctgcccctttacagaactaaccacttcggcaactccttggacactttccttcttgttaataatttgctttctccgcccctcaaaagcttgctgtttctgtaaatcattacctgtaagaggaaccgctgggagtcctgtaaactttagcccagagcttggctcctcctccagaatgtctccaccaatcaaggaaagtgttttgggccagtcttgctcctccggattgtcagactgctcctccctcttctttagactgccacgaggaaaaagcagatgtgagaactcaaggttcagggctgctcttctaagaaacaagtctgccataatctccatctgtgttggaatctgttaactagtgagtacctcatctcccctcctgtgtaagatttcctgaactggcacatctgttttttgagcaaagataacaaacagatgaacaaaaccaacaatcaaaaatgctgtcattaaagtcttgggcagccaaagtttctctcagaatttctcagttgtgtgatactatctattaagtgatgaggagtatgcacacacaaaaggctataaatgtagcagctgagttttcatgttgagccttttggtgctatttgattttttgaaaaactatgtacatgtattaagttgataaattttttttttaattttaattgaaccagatgcggtggctcaagcctgtaatcccaccactttaggaggctatggtgggcagatgcagatcacttgaggccaggagttcgagaccagcttggccaacatggtgaaaccctatctctactgaaaataaaaaattagccaggtgtggtggcaggtgcctgtaaccccagctacttgggagcctgaggcagtagagtcacttgaacctgggaggtggagtttgcagtaagctgagattgcatcactgcactccagcctgggtgacagaacaagactccatctcaaaaaaaagaccaggtagtggctgagattttcattgtactgtctgcttagctccccaccttgctcagtgacagatgggaatccatcttctgcatcatccagaaagtatgtaaattacttccaggaaactttgggaaacacagatgcaaacctaagagcagccagttttctcctttaggtggtcaagggcagctgcaaaagttctgtataggaggggcttcaggcagggtctggttgggtttggagacaacagcagtgaatttaccttgcgttgaggctgtatatgttaaactactgttattacttggatacttagagggagggatgtttagggagctgtggggaggctaaagcccccttggctgtagggacaaagagcttgcatttcagatgagaccttaaatactttcagaagcctatctgaccaggggtggtactgtctttcttagaagagttttccttaccaatgtttctgtggctcagtataaaaatctggagtcaccctgggaaagttatctcagcaattttacctacaaataattttataaacctgggaaatagaagttgtaaaatgctaagatcgatgaaaagggaggaaaagaactttgttgaggagaaggtaatcttatggttttgatgaagaggatgtcgatatttgctttttggtagaacagaatggttaggttcattttaagctccaaatgactgatcaattttcttttcaacatacgtttgaaggattctgaatgtggtgtagagtattgtatgggagctagggaacaaatcatactaaactctgattctattcagaatcagcaagctaagtatgatatatttatctccaatcatattaatatttacataattatttaatgtcttccttaatagtctataagcttcatgggagcaagaccagccgtgtcttgttcacagctatattttcagcatttagtacaggtctggcatataccaagtgttcaataaatacacgggtaatgaataaatgcgttgtccaatttaaatatgtgtgtctgtttgtgtatacttccttgtctgtaaaatgaaaatactaataaataactgcaaaatgcttaacagtacaaccacttgccagatctcagcaaaaatgttacgtccctagagagacctcctaaaaggtcccttttctcccattactctctttgttttcttgcgtaacatcacatttatttattcccttgtttactatatgtgtctttctatgagagcaaggaggaccttgtctcttgcattccctcctgtatcctctatgtctgaaataattcatggcaagtgattaataattgttgaataaataaatgaatcatgccaacctaccaagaatgaagctcaagaccttaagatatttgtccaaattcctgccttttatttaatagaatcagaaattgtttctaatacttcacaaccacttaaaaatactattcatttttacatccaagtaatgaaagaatcaggacgttccttttggaagacatagtttcaacattttatctaaattgcaaaattatacaaaaactcaagtgaccattgataggggaccggtttaagaaatgacagtgcagttcttcactagaatgtcatacaactgttaaaagaaaaaaatcagaacagggctgagtgtggtggctcccacctgtaatcctagtgctttgggaggccgtgtgcgtgtttgtgtatatttccttgtctgtaaaatggaaataataataaataactgcaaagtgcttagcacaggaggattgcttgaggtcaggagtttgagaccagcctgggcaacatagtgagacccccatctctaaaaaattttttaaaacacttagctgggtgtggtggcacacacctgtaattccaggtactctggaggctgaggcaggaggatcgcttcatcccagaagttcaagctgcagtgaggggtggtcgtgccactacactccagtctgggtgacagagtgagatccatcctgtctttaggcagggaaaaaaaggaaagaataaatgaataaatacttcatttaaaaaaatagaatgaagatctctgcgcactggtatggaaagcccttaaaaggtacattgttaaaaatgtttttagtgggcagaatagtgtgtattctgtgctacctgttgtgtaaaattggtggagaaataagaatctatactcataatttgcttgaatgcacataaagaaaccctgaaaagataagtagaaataataatagtggtttcctgggagtgagagcaaagtgggcagctttgagactagaggtgggaggcagatatttttttttccctctgtaccttttacagtttttttgagccatttgaagatattatgcgaaaaaaaattaaaaacagagagagacaagtagtgttgattacttaacttctttcagttgaaggaaacctgatgctaattctgttaagaggagagcagccaaaagcataggttgtgacttgccagcaaaaaacagggaccggggccgggcgcggtggctcacgcctgtaatcccagcactttgggaggccgaggcgggcggatcacgaggtcaggagatcgagaccatcctggctaacacggtgaaaccccgtctctactaaaaatacaaaaaattagccgggcgtagtggcgggcgcctgtagtcccagctactcgggaggctgaggcaggagaatggcgtgaacccgggaggcggagcttgcagtgagccgagatcgcgccactgcactccagcctgggcgacagagcgagactccgtctcaaaaaaaaaaaaaaaaaaaaaaaaaaaaacagggaccggtagttccctctgtacccaatccccaatgccaaacagaatgacattgttagacttaaggtcttaacctgcagggcaactgggattcagagtgattttagttctgttcttaagagcagccttttctcctaaagcctgccaagaaatttttgttaattcttcccaggaacataacagacaaggcccctgctctggtagaacttacatcacagtgcaaagatcagcaaactgtagcccatgggtcaaatccagccctctgcctgtttttgtatagcctttgaaccaagaatggtttttaaattttttaatggttgaaaaaataactaaaagaggaacactaattcatgacacatgaaaattaaatgaaattctagtgtcagtaccataaataaggttttattagaacacagccatgccaaaatttatttatgtattgtcaatggctgctctctcaatggcagagttaaatacctgcagcagagaccatatggcccacaaagcctcaaatatttagtgtctggcccttcacagaaaaagtttgctgacccctattctagtagagagtaatatgcttggcaccatgataagcattttgcatacagtatcccattcagtcttcaggacaaatctctgatggaggttctattagtcgctccattggtaaaatgtgaaactgaggttcagagtgattaataattcaaataaggtcatgcagttcataagaggcaaaactgggagaccatatcacatgaccatatgactcagtagccagtgtatttaaccatcatgccatagactggtgcttttcacacttgaatgtacataccagtcacctgggatcttgttaaaatgtcaacatctaccaattcagtagatctagagtggggcctgagaatgtgcatttctaacaagcttctaggtgataaagatgatgatggtggttcacaaatcacagcctctaaatcagtgattctcaaccatggctgctgcacattaaaatctgaggacattttaaaaaatataaatgggcccagagcccactctgaaatattctgatttaattgatccaagacctaggcatcagagtatttttttttaatgctttcttggtgattcaaatgtacagctggactgcaaaccactgctctattgaaatcctgtcgaatgacagtaaaaacatttaatccaaagaccagagttctagttctaactctggtatgacagaatgaagcaggctgtttcccctctctgggtctccagttttctttgcaggtgaaaaaggaaaaagctgaaaccagatggtgtcagagggctcaagatcactgacttgtcaggtcttcacacacataaatgggaaggacagaagtacccaggtttcctgatgcatcggttatatcaacatgatgcccaaacaccaggtctgcttagggtaaaactgcaataactgtagatgtcagctaaactgtccatttagctgacatctgcaattatgtattgttttggcaatgtatcaatacagaaatgcttccacatagccagactgccttacatggcacacagctagaattgtagttagaatgatgatttaatgattatgagagtaatatatattgcattgtaggaaatttggaaaattacaggaagtataatgaggagaatctcaaacactcataatccctagaactgtatttttaacagcctcaaccaagtaaatgacattgtgatcaaatgatttcccacagaagcaggcgatggcccagaggggcctccccgacaaaagtcctaaatgttaaagccccattattacatctctattaaatgcagctccaagcctggacttaaaagtagtatgggcccctattgagagcatgggaactgcaacctatcaactagacagttcataaactgtgacagtgctttcatgtctaattgttattgggctactctcgatttcttcatctacagattatccactgtgaaaaatgctccttaacatttctaccctactttgaaatctgcaggtgaaagatattagacaagaagccttagccctttgctttcagtgagattaagtgggtgacccagatctttacttctttagaaatgcatatgggtgtcaatagtgcacagtattctggagaatgggctaggacctgatagttctgggttcaaatccagccaatgcctcttactagtcattttctcaatctgtaaacagagatgataatagtacccacttcacagggtttctctgaggatttaataagaaagtgtctataaaacactgagcactgtgtttggaacacagagtgtacgcagcaaatggtactatcatgatgattatcaatactaataacaaaacttagccactttggggtatggctaccttcaggacagaaacaaatatatgtcctttttgcttgtcttttagatgaactggtctctgtgcaaatcctgagtgctaaagcttccaacaagactgatgctagctcgtgtcaccaggaagatgctacgtcatgccaagtgttttcagcgcctagcaatttttggttctgtgagggcactgcataaagataatagaacagcaacccctcagaatttctccaactatgaatccatgaaacaggacttcaaactggggattccagagtatttcaactttgctaaagatgtcctggaccaatggactgataaggaaaaggtatggggggagggccagtcagaccacaatttctcaactgggagtgattttacccctaggtaacatctctaatgtctagaaatatttttgttgccatgataggggcagaggcagttgctactggcatctaacaggtaaaagccagggattctgctaaatatcccataatgcacagggcagcctccagaacaaagaattatttgacccgaaatgtcaatagttccatggttagttgagagaccctgtattacataaatgtagaattctaggttgacttaaaaaaaaaaaaggagaagagtgaaaagtaattccaagagtcagaaatggtagaaaaggaggcacagataaatctttggggaaaatgtaaaggatgcaagaattctcacttattggaaagaaaaatgatcaggctaaatgggaaatgatttgggccaaaagaaatgacatggcttccaacgtctagaaataaggaccccaaagttattatttttcctgttatgtttagttatgtaataactatacatagttatggggtacaaagatatttttgatacatgtataaaatgtgtagtgatcaaatgagggtaattaggctacccatcatcccaaacatgcatcatttctttgtgctgggagcattcaaaatcctctctcctagctttttgaacatactcaatatattattcttaactgttttcactctacagtgctatagaacactagaacttattccatccatctagctataattttgcatccattaaccaacctctttctatgctcctctccccactaccgttcctagcctctaatagccacaattccactccctacttctatgagctcttttcaggctggagtgcggtggtgtgatctcagcccactgcaacctccgcctcatgagttcaagcaattcttgtgcctcagcctcccgagtagccgggactacaggcacctgccaccatgccggctaatttttgtatttttagtagagacagggttttgccatgttggccaggctgaccttgaactcctggtctcaagtgatccgcccaccttggcctcccaaagcactgggattacaggcgtgagccacccaccacgccaggccgagctccttttttttttttttttttttttttttaagagacagggtcttactttgttgcccaggctgaagttcagtgaagctcatttttttaagctcccacatatgagtaagaacatgtggcatttatctttccgtgtctgacttatttcacttaacataatgtcctccaagttcatacatgttgccacaaataacagaatttcattcttttttatggctgaatagtattgcactgtgtatatataccacattttctttatccattcatctcttgatagacatttaggttgattccatatcttggctattatgtacagtgctgcaataaacatggcagtgcagatatctcttcaatagactgatttcctttcctttgaaaaaatacccagtggtgagactgctaaatcatatggtagttttatttttagttttttgagaggcccttatattgttttctgcaatggctgtactaatttatattctcaccaatagtgtttcagagttcccttttctccacatcctctcaagcatttgttatcttttgtctttttgacaatagccattctaactggggtaagatcatatctcatcatggttttgatttgaattatcctgatgattaatgatgttgagcattttttcatatacttgctgccaattagtatgtcttttgagaaatgtctattcagattctatgtccattttttaattgaattatttgttttgttttgttttgttttgctgttgggttatttgcattccctgtatattctggatattaattccttgtcaggtgaatagttcacaaatattttctcccattctacatcttgtctcttctctctgttgattgcttcctttactgtccagaagctttttagctttgtatagtcccatttgtctgtttttggttttgttgcctgtgttttcatatccttatccctaaaatatttgcctaggggagtctcagagcctactctggctcaggatctgcccaattttattaaatttattataaaatttaaaaaattttaaaaattaaaattaaaataaaaaataaaacatttgccttgatcaatgacttgaagcatttacactatattttcttcggttgttttatagttttgagtcttacatttaagtctataatccagttcgagttgatttttgtatatggtgagagagagggctctagtcttagtctaccacatatgattaccacttttcctcggaccatgtactgaagaggatatcctttcctcagtgtatgttcttggcacctttgttgaaaatctgttgaatgtaaatgtgtgggtttagttctgggttatctattctgtttcattggtctatgcatctgtttttatgccaataccatgctgttttggttactatagctctgtagtatgatttgaagttaggaagtgtggtgtctctactaaaaatacaaaaattagccgggcatggtggtgcatgcctgtaatcccagctactagggaggctaagggaggagaatcactttaatctgggaggtggaggttgcagtgaactgagatcacaccattgcactccagcctaggtgacaagagtgagactccctctcaaaaaaaaaaaaaaaagatttagtgttagttcttatggtagaattcagcagtaaaaccatccaattctgggctttttttattactgattcaatctcattacatattattggtctattcaggttttctatcttggtaggttatgtgtgtccaggaatttatccatttcctctatgttttccaatttgttggcatatagttgttcataagagtctttaatgatcttttgtatttctgtggtacagttgtaatgtctcctttttcatttctgattttatttatttgggtcttctctttttttcttaatctagctaaagatttgtctattttgtttttcctcaaaaaattttgttttgttgatcttttataattttgcctcaatttcatttatttctgctctgatctttattatttctttctttctactaattttggatttagtttgttcttgcttttctggttccttgaggtgcattcttagattgtttatttgaaatctttctgcttgtttgatataggtgtttatggctataaacttcccttcttaacactgtgtttgctttatttcattgattttgatatattatgcttccattttcattattttcaagacattttttgctttccttctcaatttcatcattgactcactggtcattcaggagcatgttgtttaatttccatgtatttgtacagttttccaaagttcctcttgttactgatttctagttttattccattgtggtctaagaacatacctggtatgatttcaatttttaagaatttgttgaaatttgttttgtgccctaacatatggtctattctggagaatgtgccatgtgctgatgagaagaagaatgtgtattctgtagctgttggataaaatgttgtgtaaatatctgcgaggtccatttggtccaaagtgcagtataaatccaatgtttctttgttaattttctgtctagatgatccgtctaatgctgagggtagagtgttaaagtcctgaacattgttgtattggagtctatctgtttacatctaatgatatttgctttatatatccaggtgcactgatgttgggtgcgtatatatttacaattgttatatcctcttgctgaattgatctatttatcattatataatgaccttctttgcctctttttatgttttctgacttaaagtctatttcatgtgatataagcatagctattcctgcacacttttggtttctatttgtttgaaatattattttccatctcttcattttctgtgtctttttttttttttttttttttgagacagcgtctcactctgtcaccaggctggagtgcagtggcacgatctcagctcactgcaacctccgcctcccgggttcaagcgattctcctgcctcagcctcccaagtagctgggactacaaggtgcacgctatcatgcccagctaatgtttgtattttttatagagacggggtttccccatgttggccaggatggtctcgatttcttgacttcgtgatccgcccgccttggcctcccaaagtgctgggattacaggcatgagccactgcgcctggccctatctatgtgtatctttacaggtgaagtgagtttcttgtaggcagcctatagttgggtcttgttttttatccatttagtcagtccatacagtccatatcttttaactggggaatttaaactgtttacattcaagattgttattgataggtgttattttgttcatcataagggtgccagcagtggctccagtgggtcccaggcaggctgatcctcaggctcccaggaagtgtgcatgggcactggcagtagcagtggtaagcctcaagtgagtcagacctcaggtcctttggcagtgcacatgggtacttgtagtagtggcagcctgaatgggccagtccttgggtccgcagatggcaatgcaggcacaaagcggctctgccactagagggggcaagatcatgttcatggcagcaggctcaggaaggcagctctcaggctctggggagtgtgctttagtgccttatgtcctggggcagcctctcttgatgtgctggactccctgttacctggggtgtagagtgctgtgtgtaggctcgggtgccagtggcctggctctatcactggatccacctggtgttggaatgctgcagccctctacgggaacgtgtggggatgtcagcaaggccccagggatgtggagatgcaggggcaattggccccagggcaagatgtagtatggtagtagctctgttcctaaaatgatgccatgctatagcagctcgggtcctggggtttgttgcaggaggacctagtatgaacttcctctctggaacaatgttatactatactagtatactatactatacagcgtttactaggctcagggcatgtgagggctgaggggctctcctgtaggtgggacttcaggcatctgtgatgggaatgtgtactgctgaggatcttccacttacattttcctcaaaatagggagtccctctgggctctgtgctgatcctggccagctgctcttcttccctctctatgctttcatctctagttttcaggtctcagagagttttgtcacttccttgctaaattccagtgttctccctttgacactctatttgtcatgttatctgcttactgtcttggtacttctggtaggaggtgagtactgggcatctctagtcatccatcttgatgatgtctcccccagagttatttccaaattctccatccatgttctaactaatgacttgcgaactttcttcagctaatctattccattgagtcagttggcccagaatttagctgtataacaacctttaaatcaatgactggtttttctttcctcaggctggaaagaaaccttcaaatccagccttctggtggatcaacagaaatggagaagagatgcgatggagttttgaggaactgggatctctgtccagaaaatttgccaatatactttcagaagcctgttccctacaaagaggagatcgggtaattctgattctgcccagggtcccagagtggtggcttgcaaatgtggcctgtctgcgaacaggttagtaatgtttgctttccgatcatatttattactaagctggaggggagattttccagaacacctaagtaatcatgatacatttattttgttgtgggcttattgtcaaagagtgcctttaaattatataaaagttaggccgtggtaggctaattccttatccctaggtggaacatctttaaaagataatcttagagttacagcctcacaaaaattgttgtgttgccctgattagaaagaaaagatattctaaagaacctgtgttctggtcctggttgttggtttcttgaagaaccctgatggagaggcctggtccttcccaaagtgaaaggatgagccagtgtcaagagtccaggaatgccagacatgtgttccccaatcttcttgcctactgtgtcgcctgggaagagtaaaacctattgtgaagtgaatgctttccatccctgtcttaagggtctgggacttaagggtggtggggcccaggaggaagatctatatatttttgagagtccatttatcctttgagaaaataatacccaaagcttactgagcactgttctaagttctttacatattttaactcatttaatcccctaattatcctataaaagaagtagtattattacaatatcactttacagatgcagaacctgaagctcacagaggtgaagtggcttgtcccaagtcccagctataagagtgtctggctccaggacactcttaatcattatacttcatcttacagtgtaatatataaccagcaggaatagaaccacagaaaagatgaatgcctccacacttccttttggaaataaatcataaagcaatcatgtacattttaagaggcactcagctgatgtggtgaagtgtacagttctggagtcaggctacagggttcaatccctgcactgtcacttactacttaagtgataccttgggcaagttattcatagcttttatgttttggggtttttttggtggggactgaataagttaaaacatataatcaaatactcaataaatattggttaatattacttttcaatcaaaaccttcttcaagctcaatgttagggatggtcttcaaataaagaataattatccagtatttaacatgctttcatgttaagccaaaagggtcatagactctgaaatcccttgaaaggcaaaagcagataagtgaaagcaagataaatagatatcttcctggtaaactgactaactcactctgagaaatacagaatgtatagatggtatctacactactctaacataatgaagaataacatttcttctaaacactgtttcttttctgcccctttagggacagttttaattccaggaaccactcagctgacccagaaagacattctctacagactacaatcttcaaaagcaaactgcattatcaccaatgatgttttagccccagcagtagacgctgttgcatccaaatgtgaaaatctgcactccaagctgattgtatcagagaactccagagaggggtgggggaacctcaaggagttgatgaagtgagtagccacacttgttgtaaaacagcttcccaaaaggaaaggcaacaataaaaagatattaaacccagcagtgattagaaaaatgcaaattaaaacaacaggcaaagggaacagttggtagttattgctgcactaatagtgctaaactctgaagtaggaaggagcttggagtgctttttgtaggttgggatcccctgagattggagattggtgtataggaagtttattaaggagttcttttgggattaacacctgtgaggaatgagtaagaatgtcggactgggcagagaaagaaatttatttgcgatgtattccctacaaagctttcagtcaacccactgggacctctgaaggacctcctcaaagctgttcccagctaaagcaagaggtcctggcctttatatacccacattgatcagtaattggatggggttgtccctaggagtcaagacctttaacaaagccactgtcttcagtcaaggcaatctctagagagtgctcccagcacctgtcactgaaggatcacagtcagtccttcagtgttggctatcccattcccttgctgacagcaacactggtatcaggttaaaagaaaaaatgcttaatgttaatggatgcaattataaaagtgaatttcactgatgttgaagcctagcatggggtgtttccatgggttacttggaactcttgccaggtactggttatgccttagaattgggctggcagcaaagtccttctctagaatgagcttcctacctttactcaaggatttgggagcatgcttgcaactatggacttttcctaccacatttaaaattcctaatattgagttcttgccaaaggccaagtacggttctaataaaaataatgttataattgcaatcatagcttatattgatacggttatgtgccagaaactattctaaggacttcagatatattacctcatttaaacctcacagcaacctaggtactataattacacagctgaataaggtcaaatgctagtatctggcagagctaagtttcaaacccaggcagtatgggtgctgagcctacactcctcacttctgtatgtactgcctctagtaagagatcagtacaacaacccttcctcaggttttgagggcaaccgtattggtgatggaagtgataggaacacagctatagatacttttttttttttagacggagtctcactctgtcacccaggctggagtgtagtggcgcaatctcggctcactgcaacctccacctcccgagttcaagcgattctcctgcctcagccttccaagtagttgggattacaggcacatgccactatgcccacctaatctttttgtatttttagcagatatggggtttcgtcatgttagccaggatggtctcaatctcctgacttcatgatctgcccgtctcagcctcccaaagtgctgggattacaggcgtgagccactgcgcccggcctatagatagtatttttaattaattaagataattatgaaatcatagactgaacacttggtgtagctttgtcagattttgaaaacagctttttagccaggcgcagtggctgatgcctataaatcatcactttaggaggctgaggtgggatgatggtttgagtccaggagttcaagaccagcttgggaaacacagtgaaacctcttctctatataaataaaaataattagccaggcatggtgatgcatacctgtagtcccagcctactcgggaggctgaggtaggaagatcgcttgaacccaggaggtcatggctgcaatgagccatgactgagccactgcactccagcctgggtgagagagagagaaaccctgtctcaaaaaaaaaaaaaagaaaagaaaagaaaagaaagaaaagaaaatagcttttctatatttctcatgaatggcctggttgtttctactcattctcaaccccacatgcctggataagtctgtgtgcatcttagacacttgatatgtatgtgtgcagctgccctaatgtgtgacttgtatagaagtctgattatcctttggaactaaaaggttttctttctctttaactggaactctttcttccctggatggatgcttagatcctgttcaatcttattgtctgctatatccagaactatgtagactctcttgtgggaaacagaaaagccaacctttcacggtcagcaaacttttttttttttttttttgagacagagtctttctctgtcacccaggctggagtacggtggctcgatcttggctcactgcaacctccacctccctggttcaagcgattctcagcctcctgagtagctgggattacaggtatgtgccactgtgcctggctaatttttgtattttcagtagagacagagtttcgccatgttggccaggctggtctcgaactcctgacctcaggtgattcacccgcttcagcttcccaaagtgctgggattacaggcgtgagccaccatgcccagcctcagcaaacattttctgtaaaagggacagagaataaatacttaaggcttgcaggccgtatagtcagtctcatcacaactactcaactctgccactgtagtgtgaaagcaaccacaggtactacctcaatgaatgggcaataacattttatttacagaaacaagaggcaagtcagattttgccagtaggctgtagtgtgttggcccatcagtacccatggcttttactaacatgtattgtattaacatactcatttttaaaaaatcacattttaaagcatccataggggagggaaggggaaaattcttccttatccatgattgcaagatcacacagactccttactctgctggaggtatgataaaaatctcaagttttaaaaatgcttcaatccttctttatcatagaataaaaagctaggaaagcagctattataaatgggcctttgatgacaaagtttagttttgattctagaaagcacctaaaaggatagagaaagtgatggcttttaccctgtaattcaagctaagccactggcacctgattcatgacatgaagaggttcaagtggagagcttctcaaaatttttcagtggtaacagtctgtgatgctgtgtttaacatgcagtcattgtagtttttcctttgcagacatgccagtgacagccacacctgtgtgaagacaaaacacaatgagatcatggccatattctttaccagtggaacaagtggatatccgaaaatgactgcacacacccacagcagttttggtttaggattatctgtaaatggaaggtatactttcacaaaagtgcagcttgaagtgtcaaaactgcaaagatgatgacttatgtactggtcttttatatttattttcctatgtacatcagggctactctttgttttcccaggttctggctagatttgacaccctcagatgtgatgtggaatacctcagatacgggctgggcaaagtctgcatggagtagtgttttttctccgtggatccagggagcatgtgtattcacacaccatttaccccgttttgagccgacttctatcttgcaagtaagccaaagcacaaagaggtcaatatttagaaatgcattaagcagtatggctgacagaactggtgaataaagcaacttgcagagatcagagtagacaatatgatttaagatatgtcacatccagaaagtcaataagcctgaaaagatacactcggccccctctgtatccacaggttctgcagcctctgattctgccaggcacatattgaaaatatttggggagaaaaaccaaaaacaaaatacaacaattaaaaaaatgcaaataaaaaataccatgtaacaaatatatacatagcatttacattgttttaggcagtataaataatctagagatgatttaaagtatacgggaggatatgcataggttatatgcaaataccatacaattttatataagggacttaagcattcctggaaccaatcctgcagacactgagggatgattctacaagaaaaggtaagaatgtatttacattaacataaacaatgtttaaattgtgctgcgtcaaccaaagacatttaagcacttatttaagttgtagtaagaccaagagtttgctttttctaaattgcagacactctccaagtaccccatcacagtcttctgttcagcaccaactgtataccgaatgcttgtacagaatgatataaccaggtaagaaatgttagtaaataggcatctagtggggagaggggagaagaggaagctataaaataaaagatctttctgcctgaaacatagctccaagccagtagacacaggatttagcaatctctcctcttcctctttctccttcttgcctgcattctgtaaatgataattactgtgaccagggcaagatcccccaaacaagaagaaagtgagggttcagctatgtttatagctctaagcccagtggttatgggtaagaagatggtaaatcttttggatgatggctttctctgagctgagaaagtagagaacttgtttctatttggaaccttatcccagcagatagaaaagaggatgcatatcttttattctattgctgattccatttgaaagggttcattggtaatccaaaaagaaaaacaacccccgtttctctttgttttgtttttgtttttgttttgttttgttttgtttcaatagggttttgggaaacaggtggtgtttggttacatgaataagttctttagtggtgacttctgagattttggtgctcccatcacccaagcagtatacactgtactcaatgtatagtcttttatccctcacccacctcccaccctttccccagagtccccaaagtccattatatcattcttacgctattgcatcctcataactcaactcccagcaaccactattttactatattcacaacactcaatactctgggtctccagatgtaagggatcttttcccccacattgaccaattctccaacatcagttgagtatcctatgatttaattcagtctgacattatctccgtggaggcagcatcatatcccacaggttaatgactcagtcccacaagactctttcccatctcaaatgctaatcacaagtccaggctgtcacctgcgcatatgaccaaatggctacaaatcagaggttcccatgacccttccttgggtttagtaatttgctatgatggctcacagagtgcaagaaaacacttacttacatttcccagcttattataaaagatatgataaaagttacagatgaatagctagccagatgaagaggtacatagggtgaggtccacaaggtcccaagtgcagcagcttctatccctgtggagtgggggtgcactacctttccggcacgtggtgctctccaaacctcatacttcagggatttttttggaggctccattatgtaggcatgattgattattaagtcaatctccagctcctctcctttccctgaaggatggaggtgaggctgaaagtgccaagcttctgttcctggcttagtctttcttgtgaccaacccctatacgggagccccattgagagtcgcctcatgagaacaaaagacaattctattacccaggaaattccatggaatttagaagctctgtatcagaaactagagtcaaaggcaaaatattagaacaaaagatactcctagcacacccatcacttgggaaattacaaaggttttagaagctctgggccaggaacccaggatgaagactcagtacaggttgagtatcccttatccaaaatgcttgagaccagaagtcttttggatttcagattgttttggattttggaatatttgcattatactggttgggctgccctaatccaaaaacatgaaacctgaaatcctccaatgagcatttcctttgagcatcatgttggtactaaaaaagtttcagattttggagcactttggattttgaattttcagattaaggatactcaacatctatgtatttcttgttatagctcatatcacaggtaaatatatttaaactgatgttatttaattatcgaataggaaataattcacctgccataaaattcaaaaggtatataaaaatacatagtgaaaagtcttgcttcaaaccttgtccccagtgacccagtcctcttccatggaggcaaactgagtttccagtttcttgtctattctccctgaaaatacacaaactgatacacatgtgttctccccgtctcaatttttttttttttgagacggagtcttgctctgttgcccaggctggagtgcagtggcacaatctcggctcactgcaacctccgcctcctgttcaagcaattctcctgcctcagcctcctgagcatgtaggattacaggtgtgcaccaccatgcctggctactttttgtatttttagtggagatggggttctgccacgttggccaggcaggtctcgaactcctgatgtcaggtgatccgcccacctctaactcccaaagtgctgggattacaggtgtaagccaccacacctggcctttccttctctattataaacataaatggtatcacaagattcacacagttctgcaccttgcttttttcctctaacaatacattctggcactgtgttgtgcaatatggtagccactaaccacagctagttatttcaatataaatattaagtaaaattaaaaattcaattcctcagttatactagtcctgtttctagtgttcaatatccatatagggctagcatatactgtagtgggtacagcagattacagagtacttccatataacagaaagttctactgggcagcactgtccaagagcttcctcatttttcatagctgtatagtattccattgtataaatatcccaccatcagttttaccaaacaattggtacttttcattgctgatttaaagtgttattatggtgctcacttcagcagtacatacactaaaattggaatgatacagagcagattagcatggcccctgcacaaggatgacatgcaaatttttgaagcattccatgaaaacataaaaataaaaacaaaataaaataaaatgttattatggggtaccttccctaagaacagaatgaccttctttgtaataaattatacctccaccacaaaaaggggggtaaagaaaaactagtatttggggtattctagtatcattctatgatattagaatgatttatctttttaatatctttatttttaatttgtgtaggtacttagtagttgtatatgtttatggggtaaaatggtttgttttgtgctagggagaggaattaaaaagcgactaaaacattttatattgaagttcataagaaataatccttaatcttcacttctctccatttttcctcctaaatctaacttatctggttttctgagaagctataagtttaaaagcttaaagcactgtgtgagtgctggggaaccaattacccctgacgtgactgaaaaatggagaaacaagacgggcctggatatctacgaaggatatggacagactgaaacggtacctgacctcactgaaaagacatagctggattccatttagtcagatgaataaaaaccaaagtgtccacagtctccttatgattatttgagggataggagttgagtggttagaaaatgtttaaaaaaacaatgcttgcaagaacctaattgcaaaaaagctctgttaacagatagttgtttaaatagccattcattgacaaacaccactgttaatggatcagagtaagggcattacaatatttttttaaatgaaataatactggatctactgaaagaaagaattcctcccagtgtgatagggaagtatcttatttagggctgcctcaaaatggaaaatgctgagatccttgctgcctgaaatattaagagtttgctggacaactccttagcaaccatactctaaaaaggattttttaaagagctcatagagataaggaataagaaattctagaggaaatgaatgaaataagaacaaaaaatgaaataagaacaaaaaatgaaataagaaaaaagaacaacagtggttattttgtagaagagggaggagtaagatgaaatagataagggaaaagttgaaaaaacttttcacaatgtgtctttataatgcttcaatttatgaaccatgagaatgtatcacctggtaaaaaatgaaaatatcaaaaataaaaatcaaaaattgaaaaattcattaactagaaatagcataacaagtatgctaatataaatgcaaatgttaatatactcatgttttgataaatacggatatatgagtaattattgttataactatattttatacatatgcatgtatttatatgttatcactacattccatgagagtatagcattcattttgagcctagttcatagtaagttttcaataaataatttgttgaatgaatgcatgatagatgaataaattttaagtgacttgtaatgttatcttactttttcttcttcttaactaggtgctaatctgtggaaattttaagggaatgaaaattaaacctggctcaatgggaaaaccttctcctgctttcgatgttaaggtttgcacatccccttccaggagaatgtttaacaacccaatctgtacactacctacctaccgcttacccccatataaactttctttgttatgatggtgattccattttacttccatgatactttaatttttataaatatgtgaaaatgattagaaatgttagcttcttggtctccattattttgcaaatacccatattgtaccatacagttctaagcatttaataaacgttaacccattaggctggatgcagtggctcacgcctgtaatcccaacactttgggaggccaaggcgggagcatcacttgagcccaggagttcaagaccagcctgggcaacaacgtgagactttgtctctacaaaaaaatataaaaaactagccaggcatggtggtacgtgcctgtggtcccagctactcagaaggctgagatgggaggattgcttgagcctgggagcttggggctgcagtgagccatgatcacaccactgcactctaacctgggccacagagcaagaccctgtctctaaataaataaatattaacccattgaatttccagaagaaaccctatgagaagcatactaatattagaaccattttacaaacaaggcacaaagaggtaaaagaactcaccagaagtcacacagctaatagctgctagagttgggattcaatcccaagcagtctggctccaatatctgcactcttaaccacaacacaacactggtcctctcaggcaagggaggtcaagaccttctgagcgggtcaactaggcccgaagaggcttcagtttacagtggctgcagcactttccctctctgctcccaagcctgcctggccatttccagcctctctgtatccactgccactactaccacctgatgcctagggggaattccagttccccatcagcaagctttatatagggttaaaattgttctcagatcaaccgagcttcaaagctgggtgtagccaaaggaacttaacactaatttggacactcctcaacttatgatagggttatgtcccaaaataataagtcatcataagttgaaaacatcctaagtcacaaatgcatggctgactgggagctgtgacttactgttgctgcccagcatctagagagaaagatggtttcaactgaatggttatctttttcacccattgtaaagttgggaaatagtaagttcgaaccattttaattcagagacccatctgtacgttaagagacagcaaaagcagcaaaaatatggatgaattaacagagtacagctcttagataaatgtttcccaagcttgtttgatcataaacatcatatggatatctgttaaaaatactaattctcaggcccctggagagaccaattcaatagatttggagtggaactctgaaatttgaaatcttgtgattttaacaagcaccccccaagtagtttttaggatcaaataagtttgagagagtttagatgagcttgattgctgctgtaactctttatagaataaaccagatcctgggtcctttctctcactttaaccttgctgtggaaacctggtctcaagataggatagcctagtggttcaactatatctctgctattcactgtctgagtgtctgtgggtacactgttaaagctctgtaagttccagtttcctaatttgtaaagttgggactagagtgaccaacctgtctgtttgcctgggacttatctggttttagcacttaaggcaatacatcctgaagaaccaccccccgacaacccctcaccacttcagtctcagatggttggtaaaccaaataataacagaactgatttcataggtttcttgtggtgattaaaggagacaatatgtttaaagagcatatcagaatgcttagtacataataaaggtccaaaagatgggtactgttatttacttctccctcacattcctctttttatttatttatttatttttttattttttcacattcctctttgaaaagcttatctaagaaaaaatggtaggagagcccaaacaggcttaacaatagtttgttggttaacaggctaccttaggttgaagaaagaaatattgataattaagcacactcatgtctgcattacagggaagttgatatgtaacacagctatgttctttttcttccttccttaatagcaattcccaacatgcatggctatcagggtcttacaggcacagctgtattcacagtgatcccaactgcaaggtacccccacctgctccccattaatttgagcccagtggttttctagagcagctatctttgaatgcaaatatgatgaggctgagaggaaaacagtactttttctgcatccccagtcatttttaactcttttccacgggccgttattatggggcttcttgttccttagctaagggcatctgcagtaacattctggcatctggggatgtgttccaaccaggtgaatatcagattcctacaacttcaaagcccaacctttataatcttctttgtttgcttttaaatactcataattttcatgtttaaacattttaagaccctatgaacaatgaggaacatgattctccccagacacagaagattttatctatattcccatctattaaaatctgtaagtaactggaacttttaaaatacttcctttccatcaataattccttcatacctggaaccacatatttctttagataactgggtgggaatttatatttttttatttgcaagagcttaaagagaagtttttacgcttagaattcctttgccatttaagtttctcattcagcacataagcccctttccttttggaaagtgctagataagtattatacttattctccatgcaggccacacctcaggtttgaaggtatctggagaatatatataaaagcagaattttgatacttagaaacagctaaaagtcatttagagcaaaatctgatgtataaaatcagcaatcaacttgagaaatgctaatctgatttttttaattggattaaactctctagaggcattgcacagaggagtgtaatgattaaaagcatatgatctggagtgtaagtggtgagatttggattccagctcaatcatgcacagtgttaaactctctacacctcagtttcctcatgtgtcaaatgggcataaaaattctaaccacatagggctacagtgaggaataggtacatgtcaagtacttaaaggtttagcattaattacttagcatgtattaagtacttaataaatgctagctactggtagacacttcagggaatgatgaggattggagagagggtaagagagcaaggctgtggcttacttaccattgtcaaccagagaatattccccttttcctgtttactcatattgggcttctgaagtaaggttctgtaggttccacagctaaacaaagtttgaaaaccagtaatgaagatatttatttatcaagaggaaaagataatcaagacctattgctaaatgataaaagcaggttggcaaaactgtatattataaagcaactctatttttctttttttttttttttttttgagatggagtttcactcattgcccaggctggagtgatctcggctcactgcaacctccccatcccgggttcaagcaattctcctgctcaacctcccaagtggctgggattacaggtgcccaccaccatgcctggctaatttttctatttttagtagagatggggtttcaccatgttgctcaggctggtcttgaactcctgacctcaggcgatccacccgcctcggcctcccaaagtgctaggattacaggcatgagccactgcgcccagccagcaatcctatttttcgatttatctatattgtctcaaaggatattaccaaaatgtgattattgctggatggtaaaatttttaaaaaattttatcctgcgttcacatgttggtaacctgtatttaatattttatgcaataagaatttaagtaaatatatttctcttaggaatttaaagtatatttaaaatatttttgggccaggtgcagtggctcatgcctataatcccagcactttgggaggccaaggctggaatatcactggaagccaggaaccagcctgggcaacataatgagtccctcatccctacaaaaaataaaaataaacattagctgagcataatgacatgtgcttgtagccccagatacttgggaagctgaggtgtgaggactgtttgagaccagaagtttgacgctgcagtgagctatgagctatgattgcaccactgcactccagcctgggtgacaaagtgagaccttgtctcacacacacaaaattttttttaagtcttcatttttaaatggcaaaagccaaaataaaacttgcaaagttaatatttaagctgcgacattaaacaaaaatttccttaaataaattgttctattttatcctagattgtagatgtaaatggcaatgttctacctcctggacaagaaggagatattggcattcaagttctacccaaccgaccatttggcctttttactcattacgtagtaagtgacttactaaataatctcattttctatttatttctcaagtgcttggtaacaatccctgtttgccacaaaacatacctaggataggtacttgaccctttcttgagagattggttgtcctgaatagtaatccaaaagacaagaaattgaagaaatacccaaattcttgctgaagaaaagcatgctggtcccctgaggccagatcactgttccaggtccacgaaggcaagaggaagggaccctagaaagaggacagcctcttaacatcccctgatcctctcaattatcaaacaaaacccactcattttcctgaaatccagttagtgctctttcttttcgggaagagtgagagggacaggggatgcgggggtggtgggattaagcaaatgtctttcacaagaggctttctaagctccttactgtttacaacaatattttcatctctaatcacagtatacaaattagagcaaagtctctatcatataataaaagatccagatgctacttgccagtgtatttgatataatgtaacagtatcttgttttttcttatgtcagacttgcagaaccaattctattattgtgtaaaacaaaacaaagcacaaaaacaaaacaaacctgtctgctctttattaggtgtcagtgctttcttttgactcttgagtatttacttctctcttttcctaccagcattatctattaatcaattagcaaaagacttaatttagtttactcctctgagctactgcaatatttattttgtaatctatctaagaaaaatctcaagatggaaacatgactaatctttgtaactgtagtttacctttcttctgtcgggctagctccatgctggaatttcatctttattttcacaatctatctcttcctaactctaatgcttctcaaaggagccaaacttttctgcttccttgaacatttaaaaatccaattgagggccaggagcggtggcttatgcctgtaatctcagcactttgggaggccaaggtgggcggatcacttgaggtaaggagctcgacaccagcctggccaacatggggaaactccatctcaaccaaaaaatacaaaaattagccgggtgtggtggtgcacgtctatagtcccagctatttggaaggctgaggcaggagaatcgcttgaacctgggaggcagaggttgcagtaagccaagatcgtactactgcactccagcctgggtaacagagtgagactgtctcggaaaaaaaaaaaaaaattccaattgaccagaagagttggattcaccataacaacaaaatgctatttgttttgcaggataatccttcaaaaacagcttcaactctacgaggcaatttctatatcactggggacagaggatatatggataaagatgggtatttctggtttgttgcaagagcagatgatgtcatattatcctctgggtaactttcttttccatatgtgcatatgtctgtgttaactgatcatcagtgttctagagtgaacctgccactcacctgtatgtattcctgccatatgtgtttctagctatcgaattggaccatttgaggtagaaaatgccctgaatgaacacccttcagttgcagagtcagctgttgtcagcagcccagaccccatcagaggagaggtaaaagaactgattcatgtcaactttataatttgttggcaatttaacacatacttacaaacagtagctcagtgaaacagaattaaccaaatgattcatttactaaatatgcaagtcagatagaaatatgctagtcagaaagaactgctacaaaataagattgaattatgagttgcagctctgatcctaacagacaaacaaaataaggctgaaaatacgtactagaaagaatttgaattccttccgtggtggactagggcaaagatggtgtgaatgccagtaacccaggctcacgtcaggatggggtgacagaagtcagctggatgggatcaaattgttacccagaaggtctggaaaccaacgaggtccctggtgtagtgaaggagaatgggctggcatcagatgtcagaagtgggaaccagaggctggaactgaggtaaccataagcagtcttggtaggtaaataagtagagatttcaggaaataaactctgaataacacaggtgtcctgaaagcccattcctattggggctgaccacacagtattttggcttaaaagtaccatgccaggcagcctcctgcgttttgcctgtgtgtctacaacatgcccctagggtttctctagctgagttacaagttctcacaagtatttcttcaagccatatcccttctaacactgaatccaagttttgaagatgacactgatgtcaatacaaatccagaactttctgtaccatgtattcaagctccttatctcaaatcctaggtatagggcttcaagcacagggcacagggcagagttagaaggtatccaatctcaggggatgaaataggtcctgaagtttaaggcaggccaggcacagtggctcacacctgtaatcctagcactttgggaggctgaggtgggtggatcacctgaggtcaggagtttgagacaagcctggtcaacatggtgaaaccctgtctccactaaaaatacaaaaattagccaggcatggtggcacacgcctgtaatccctgctacttgggaatctgaggcagaagaatcacttggacccgggacggggaggttacagtgagccaagatcgtgccactgtgctccagcctggctaacagaacaagactccgcctcaaaaaaataaaaataaaaataaaaaagtttaaggtaaaaataggagatgtgcatgttacagtggagggtggatctccccccaggactgattcccctaactgatctttgatgccagaagataccctgttaagtcctcctggatggcccaaagttgttccagatatagcccagtggctgggaattggtagtttgtcaagttgctaggatgacaatcgctatttactgtgaaagggtatattccaggcagctgagggcagggaaaacagtcagtgattattggcttgtctctttgctctgaacatcatcggcaaggtttcacgagtcttagctcttcctgtacttctcccctaccattagtcatcatcagttttacccacctagacaggtgcttactagggacaggatggtagctgagcctttcggaacagggttagcttggcagccacctgatatcctagcgtacaatataggaaaggtctataagtgggttgtggtcccctcacagctccgggggcttggcatagggcttggattagtcagagtgagggggaaagtgtggccagttttccaacagtggtaggctgcagcatttcctagtagaagatgtgagtgggtatctcaaacgaggtatccatgaacaaaacggccatgtgctccatgcctccctttctgctgccaggcctattctacctgggttaggtccttctctaggctgggtcctgccaggcagggtaattgggtagcaagttccagaattgattaaaaagaatatttggatttgaaataccattttaacattggaatgtgaaagacttgtggaatatgtgtctagatcactaggttcttaaatttttgggatcacatatctctttgagaatgtgaagaaaaccataggccactgttaagacttatgcagtgatggaaatgttctatatttgcaccatccaatgcgatagccatgcatggctatcaatcacttgaaatgtggctagtgtgactgagagtatttaatcttatttaattttaattgatttaaattgaaatagacacacgtggctagcagctatcatattgaatggcacagccatagacttttctcagaaaaatacaagattttgcatagaatttcatagagatttgaagcccacttatggattctgggttaaaaaataagacccaaacttcttgtaattctaagactacaactaagagctaatgtttttgatgacttactatgtgccaggcattatacatctatgctaattcatttaatcatcataatctcttttacagagaaggaaactgaggcacaaagagattacctaacttgtccaacattacacaacaaactgtgacttgaacccagctgttctgacttcagagttcatactcttacccatgttaggttgttccttgttaatttaacattttctgcagtagtttaaaaagataaaagagactatccaagttgtagaaatcgtcaatatgtgaaccagtattgcagtttttaaaataatttacctttgaatgactcacttacaacaagcataattttttaatttgtaaaaatgttaatgcagcagagctagcataactacaaatgcattttataaaatgtcaaaaagtgaatggaacaaaattatatccatagacacacacacacacaagggttcacaactgccgcatggcacatgtaaattaaaaatgttcaagtgttgttgttgttttttttcttagagacaaagtctcactatgttgcccagtctgctctcgaactcctgggctcaagcaatcctcccacctcggcctcccaaatgttggcagtacaggcgtgacccactgtgcctggccacaagggttttgggtaaagacaaaaatgggtaattgttcatacaatgtaaaactgcccactggtgaacagttttcaatatgtgaaaaaattataacttcaagtctttgtttctcaccaaatggctgtcctggtaatttgttgtttcaaataattccttttcaatgaaatctttactcccagatcaaagtggataggaaatgttgccagcttatctttaagctggacaaacgaatccttgaatttaataagatttcaggcacctaagtgcaggatacttaatcataaaaaagcttcaggggactctcctggaactgtgcctacagggaagcatcattccatagccagctccgggctggtaatctggcgttggaggtacatactagttgatgcacctagactcatgcctctagggaaggcagtaaatggcagtcctggtagtgccctaggagagaaaatgacaggactccaaatttacttttaaagggggctatgagggatggcctatctttctgtcttctccattacaggtccaaaaactaggcagagttttcaaaaacatttctaggaaggataaaatttggagaagaggatttgtaagcataaagtaataacatctttcttggcttctgccagttaaaggccaccatgatttccactcttgttcctcagggccatggaaatggatcagagcaacaaaaaaatagctgctggaatcttcacagccttgtataaagactgcatgttctctgtgaactgttcccttcaacaaagacatggcaaactcagcgtgactactgtttataagtaatcccccatgctgagggctaggctggatgaggctgggttgttacaggggtcccagaagctctcctgtattaggtacagaccaggaagtggctggcttaagagcacagagctgggatcaaactttattaaaacacactggcccaccccaccaggcatgtagattctcagagcaagcaaacaagacatactaaaacatacaaatgcataactcattttcctggtgtttcaaatatttattttaggtagtaaaggcttttgtcgttctaaatcctgattacaagtcacatgatcaagaacaactaataaaggagattcaggagcatgttaaaaaaactacagcaccttacaaatatcccagaaaggtaggcatcctaattataacgaatatttgctcagtgttgtggacaatttcaagtgtttatttttacattttaatgaatattttcttcacacatgctgcaccacatgtcccaaactgaactgatgacatatgggtaagaatcagaatctttgagattaaaatgaaaccctgaacctattttgtttggtcctttggcttactggactcacagtaaatacttaatatcaagacaactttcctaacaatacccttttccctattttggctgttacccaaaacccattccaaagactattctaattcttccacctagaattcataatcaaactgctatataattggctttatgtaaagataaaaatttccaggctaattttcttccccttgatgccaacaggtagaatttattcaagagctgccaaagactatcagtgggaagacaaaaagaaatgaactgaggaagaaagaatggaagacaatttaaagttgtttcattaattaccatatctataaaacaaacatagtatctgtcaatctctagaaaccacaagatgatggagaggtcataaaaactgtggtagtatgcttagaaactgttgatttaaaatatcttgtggttatgatatcagaggctaaattttgaaataaaatatttggcaaattcctccacattagtgtcaatgttcctatcatttcttaatataaaaataataccatcaattgctgattaatttttaaatgtatagtatagaagcagtttctgaaccagatctctgctacataggttttcaaactttagttgactaattcttctgatatgttgatatacaaatcagaaccaatgttcaagcctgaaataaaactaaagaacttataaaagtttttagaaaaatataaaatatcagttagaagattatgataatctcaaagtacaagaatctacctgaaaatagactagggatttttattagtcacattttttgcaaataatttaaaaatagtttagacttgtttcaaggtctaactataaaagaaggatcatatactattgttgcttattatatgtaatctaataaatactgtttacaaaagattacacttgtggttcctgaagaaagtatggtaaatgcagtaaacattaatatataaaataaaaataaaatagtgtaagatgttatcagaatactcatgtttggaaattcaaggaacaattaggattcatacatgaaaggttatcaattcctcattgaaggcctgagtctcaaagaatttttggtggaaatacttaaatttctgtcacaaatatggcttgtttctggagaactaaaagtgagtccccctgtggaatgagatggaaccatgctgttggctctttccttttgaagtgtttgttcccatttgaaataaccacaacattttctgttttcttggtatttcccgatagggcaacaatagaagacttttccatggttcggtccattattagaaacaacaagtctcttagatctccgaccacacttgcataatggaggtgtcattttcccactcttccatggctcttgtaggttaactgtagaagttaatatagatgggagacgcctccaggaagaacttcttactggggagcaatcagatgatgtaggcttttcttcatgaatagtgaagggttgtttttttgctggtgggaaagcttggggactgcatggattccttttggtaccacctgaaagaagaggatgtttccccaaaactaaaggatgagacatattggcattaactctgttgaaggtacttgatttgtgttcaggtaacttaaaggcagaaatatctgaacctggatctttggcttcttttacattataaatagtagtgtgaggactcttgtacacaatagacttagaagtctcagatttttgaggagtttcctctatgtctccaaagttttcatgacttgacatttccaattctttcaaaaccattaatctttctccagaattaaatgaaatctctaagtctgagtcactaatgggaactgtacagtctacgttttcctcaggctgagatgctggcagtaaaaccacatcctcccaatcagccaacacaggtaaacagtccagagtagagctcatttccaaatcagaaacatgatgaacagttggaacggtggtagaaacaagtaccaattctgaaccaactgttgaagccttagatttggtattaaatgcaagatgttcattttttccttgcttttgcatatagataggtgaattcaaggtaggagactgcaactgccccacagaagtagaggacttagtattaaaaagaggtaaggaacttttgacattgtgaagacttgcttttatattgttttttacttgtaattgatcctgttgtgcctttataggagaatttgcacaaattgacttcatttgaactttttcatgaggatttattatatttttaggctccttattatatatgctgggaccctggatgctaatgttacaggcagacatttcttcaacttgaattgtattcaaatttctggccagaatgctgaaattcttcttagtgggaacctatgattccacagacaaatgcaacagctttagaaactgtgcattcgttaatttcttcagtatacagttttatgacaaaaaagagaaatgtcattgatttataaatgactgcacacattaaatctacgtttcaaagaacgtatgactgtttatgaagtttgagatgacagaataaaaaggcaagacactactaaccttgttcaacgaccttgtaattttcattacacaaccatctctgatcattttccaagcaagaagggcagtattccgagaatcgtccaaccctgaggatacagatatcaaacactgaatttagtggtactagtactatttccttagtactaaagaaataacttaaaaagaaaaacaccacttgtgtagaaattggaacacagttttagttttatgaccatctactaattttaatcatgataaactggtcttggaagtggaaggctatggcagcattaccagtgaaagacaagctcgtccacatttatagaggaggatatgaaaatgtattagacagttccccaaaatgtggccagcgttctgcaggaaccaggatttgtgaataatctaatagtcttgttcagttttttcactagtccattctattatttgagcacttgtttaatctccatttgatttggctcattcttttcattcttcttagcaactagaaagccactagatggcagtgtatcttacaatagtttatgaaagtggtaatttgaaagtcttagaaacaatgtgaattgtttagattaggagttttttttttttaggctgaagatatcccttactaatgacattaccaaaaaatgaaattcatatgaagtattttttaaaagtcaaatggcttacataatttttaatgtatactaaccagaatgttctcgtcctgagaattctattcctacttcctgcaaggcaccacttagtccttttggttttctcctatagaaaagctaaccaataaaaaaagatatatttaaaagaagattactattttaaagactatgtattaaacacttttcataatttttagttctattagatttagaatgtgcttattttttgtgtgttgtttttaaatactttaagaaatgcatttatgtgaccagtacaaaagaaagtatcttctttgcagaaacccatgcccatgtgtaggataaaagttaatcatttttccatagaaaaaagtaaacatgcccccattttttaccattaccttgtaagttgctctgagatcaatccaagaatttaaaaacacaggttttaacagctgctttcttttacactcatactccaggcaaacccccaagtcccagtctgcattaggtacattaaaatagaacaaagtcaatgatgccagcattttttacttatgctgccaccatttacaaatagaatgctagaagatcatataaaatagaacagtatgatttcattgctctgctaatatctaaaaattattcactttatataacttactattaacaagttaggttgatgactaaatttcaaaatgatttcttaaacacccagtaaaaccttatttcagaaagaagagtaacatgttaaattacaaggactatattttctatattctaggaaaatattaatgttattgagaaaccaaacattttatagtaactggaaaccaaatatgactatcaatgctatcttatcaatgacacagtattgctattaatgactattaacagcaatgctctaacacagtcatacaaaaaacctactttaaatggctcattttttttttcttttaagtgtcaaagcataaaagcaaaggatgttgagctgatgaagactgtagaaaatagcataagagtgttcactaaatcatctttgcttaattcttaacagtggaactctagaaacatttttttaagttcaggcttaatattttaaggtatcccaaaaggttaatttaaaaaatatgtattaatttacttttcttggctaacatctgctaggcatttaaattttttttcctagcccagaagattaacaaacataattctaggttagcaagtataaaactagaaataaagaattacatagtggtaatgctacccatctgtgattaataggtataacttattctttacctgaccaagtaacaaatgcacataattttacttcagaagcagaaggctctgaaatcccagtagcaaaaataatgttcttctgttgctgaatcttatgaatccatttacagaactgagataagcaaatcttcagagggactccttcatcaacttgagcctgagtagagagtcacaaaagctgaattcaacaatcaaattccattattatttagcatgttttataactgtggagaaagattaatggttttaaaagaatcagaaatgccaagtcatgaaaacacagtgtactgtgggaagacataacaaagtggttctaactggcaaagagtttatttagtggaaagaggtaaaaacacgtgggaaagaaagaatatttagaacccaccaaggtaagaaagattaggttgataaaaactaaaatcacacagaaatatgatcattaagtccagactgacataaatcatagacaaatttgagtcacttaatttccataaaatcaatttgatcctcatttttataacattattcttcctttgctgtgtatttatttaatttttaaaatttatttttttttgagacgaggtcttgctttgttgcccagggtggagtgcagtggcatgatctcagctcactgcaacctccacctcctgggttcaagtgagtctcctgcctcagcctcccaagtagtgggaatcacaggtgtgtaacaccatgcctggctaatttttgtatttttagtagagacggggttttgccaagttggccaggctggtctcgaactcctgacctcagatgatccacccaccttggcctcccaaagtactgagattacaggtatgttcctttgctttttaaatcgagtcctgaggtgactcacgcctgtaatcccagcacctcgggaggccaaggtgggcagatcacttgaggtcaggagttcgagaccagcctggccaacatagtgaaaccctgtctctattaaaaatataaaaattagccagatgtggtggtgtgtacctatagtcccagttactcaggaagctgaggcatgagaatcgcctgaacccaggaagcagaggttgcagtgagccccgccaccttactccagcctggccaacagagcatgcctttgtctgaaaaataaataaataaatacataaatcgagtcctgaatctggaataacactaatcttatttatttatttacttatttattcatttattttcagagacaaagtctgtcacccaggatagactgagattatacctccctgcagcctcaaactcctgggctcaagtggtcctcccacctcagcctcagcctcccaagaagctgggactacagacacatgccaccaagtcaggctaatttaaattttttttttttttttttttagagatggggttctcactatgttgtctaggttggtctcaaactcctggcctcaagcaattctcgaacatcagcctgcaaagtgctgggattacaggcataagccatcatgcctaacactaaataaatctaatttcaaatggtataataacttttattttctttttgaaactgacttctgaattttaagatttgcatcatacctgctttatgcctgtcaattccatgcaaaattctgaaagaattggatgttcctgaggttgaacataagcctggaactcagagtcaatctgtccagttgatgtgttcagcaacactgctggaaactcaactaaatgaaagaataatcaattgacagttgaataaataatttttaaattaatcctgtaatcatcctaaattaaacatgttaccattttaattaaacaaccagttttcagtaaaagcatactaaaatgaccaaagcagtgtgacataaaggttataataaagttatgctaaagtcaaaatattgaagttatgagcatgttgtcttaaaagaaaacaatataattaaataaatataaaaaccatatggaatataaaatttactttttttgcaaaggcatttttttcagtttctatgccattgaggtgttgtatgtaatataaaacaactattttatataataacacatttaggtatttgagattttgctcttttttattcaacataagttttgcattaaactaccaatgcatagaccatcctgttttcttaaacttttggctgattcagatctataaactttaaagtgactcatctagtgccagctttggccattcgtagcccagacttacttatttcctggctatggtggtgcttcccatcattccagcatgtcgattcaaaatcaatgacaattaagtagtcaaacaactgctctgcaaaagatcaagttgttcttatgctttaccagtgctgaaaatgcaaggctacaaaatgcaaagaaactaagcatactactcactggatttgcttcttccgagatttccatttgctggcgcaattgactttctcctaattaatccaagctgcctaaaaatgtgaagcaatccaaatatgatcaatgaactcattcacactcctgtttgagtaggctaccaaactaatggtactgggcaacaatctcattatttattgtgactgaggggaaatcgaactggactttggctttacctgcacaggcctcgaaagtacatatttgcaaattaggctaatttgttggttttgtttttgagacagggtcttgctctgtcacgtaggttgcagtgcagtggtatgatcaccactcactacagccttaatctcctgggctcaagcaatcctcccaccacagtctcctgactaagactacagatgcatgccaccacggcccattagttttaatttttttttttttttgaaggcagggcctcactatgttacccaggctcatctcgaactcctgagctccagcaatcctcccacctcagcccctcaaagtgctgggattacaggcctgagccactgtgtccagccaatttacactaattttatgttacccttgttttacagtaatactgagtaactcatttgagttcctacaatcatttgattgtagaggtaaaaatgcactgaaaatcttatttttccccctgcattttttaagctcttgctatgtgtacagtgcagttttaagaagacaagacaatgtaggacatggttcagtcttccagtttaaaaatctgggtaaagaaacaaaagatagggccaggtaaagtggctcatgcctgtaatcccagcactttgggaggccaaggcaggtggattgcttgagctccggagttcgagaccagcctgagcaacatggtgaaaccccgtctctacaaaaattataaaacctagctggggcgtgatggtgcatacctgtagtcccaactactcaggaggctaaggtgggaggattgcttgagcccgggaggtggagactgcagtgagccgagatcatgccactgcactccagcatgggcaacagagcgagaccctgtctcaaaaaaataaataaataaaataaaataagaaaaaaagagaagagcttactgaggtcttaagtgcaagtaaaacaaactacttggtattagcaggtagagttttaactaggcagacacctcctgtagttttctgtgtttgctaagagtgggaagtgccaggatttgggaataataaatatcatttattgactgcttactacatagcaggtactaaaattaaactaagatgatggcctcctttaatcctcaacaagtgtagtagctagaaacttttcctacctatattttatggatgagaaaactgattcttaatttgccaaagaacatagctttggtatgtgaacccaagactgtccaattctgaagctcatgctatttgctattatattacatctttctagtaatcagaaatatgcacagcgcatccaggaatcagggaggacacaataattcatattgtgaattaaaaggatcactaggccaggcaccgtggctcacacctgtaaccccagcactttgggaggttgaggcgggtggatcacctgaggtcgggagttcgagaacagtctgaccaacatagagaaaccccatttctactaaaaatacaaaattagctgggtgtggtggtgcatgcctgtaatcccagctacttgggaggctgaggcaggagaatgacttgaacccgggaggcagaggttatggtaagccgagatcgcaccactgcactctagcctaggcaacaaaactccgtctcaaaaaaaaaaaaaaagatcactagaaaatgggtttgtaaaaagtagaggttcctcttcaaagacttccttccccgtctaattaggaataaatagtaacttctcttagagcaaaatttattcaaagacctgtgctaacattcttaaatatctgctagatataataaagaaatcaatgtactttatgttcttagctcccacaatttagcctaaatatttgccctggcatgcttatactggtccaatcaaacattaggtcatagcctgttcctcttccttacttaaaagtgtttttacctttctcagcattccacaagttacttccttcttcctttgttctcctctgcctttgcctcttttaaaaagttctatgttgctagtcagtcgggacaaatacagaatgtgaggtcccgttccagccaaaggaaaccggacacagcagtagggtggacgcgccacgttataaatgaccctgtctcctttgttcagtgtactctcctggcaaaactgctggcgagtgtaccctttctgcaggaagtaaaaatggccttactaaataaattaaatttaagtttaagttctatttctttacagcaccgaggaacgagcatttcgaacaggttgaacaccttgacagattcagtgtgtggcctgcctgagacctccaaccagtctgcagggcactgtcacgtccagtcgtttcccaaggcctaaaataggcaggcactggctcaaggccacacagtcaaggccccagggttcgtccgcctcgggctcctgtcaccctcgggtagaaggtggcccaaggctgaagaccgaggtccagggaggcgcctttccaaccgtgccagagagggcaggtcgcagacgccggggctgcggggaatagaggccctcaccgcagatgccacctgccgtgccctgctctgcggccaacgccagcgctggacccggagctacccgcccccgacccggaactccctcgagtaccgcgcgagccgcttggtcgccattcccgacactccttgcttttccaagtccagctgccggaagtcgctcgacttctacttccggtccgttcaaaaagcccgcgaggctgaggggcggttgttgttggcagctgtggctaaggaggggagaacctctgctccccgcccgtcttctcttctgcgtttcccgggctagggggcgtggggagtggttttaggcggcgaagccgctcggcagcaccttccttctttgccaggcagacgcccgttgtagccgttggggaaccgttgagaatccggtaaccgatgcggacggtaaagccgtttgggttagagcggcgcgggtgtccagtccgcggaacggggagatcgttggcaccttcgcttttttaggggaacggggatagttcggtaaactgaattgagaagcggatccgagggaggttgaaagctgtcaagcccgtgtagctctcccgctaggaggcggcacgcgggggaataggggcgctggagtttccccagctctacctcatctttctccacagccatggagccagagagggaagggaccgagagacaccccaggaaggtcagggaaagcaggcaggccccaaataagctggtcggggcagctgaggcgatgaaagccggttgggatctcgaggagagtcagcccgaggccaaggtgagcaacggggatcccgagcaggcggccctaggcggtttggagctcccggaccctcgcccaaccgccgtcgggggcactggattcgggcgggctctccgccctggcctctccgaacctgatccctgatcattaaaatgggaatgagtgtaataccaccttcctgcaacaaggctgtcattggctgtcactgggatagtgagtcggccgagtgcggtggctcatgcctgtaattccagcactttgggaggccgaggcgggcggatcacgaggtcaggagttcgagaccagccttgtcaacatggagaaatccccgtctctaccaaaaacacacacacaaaattagccaggcgtggtagtgggtgactgtaatcccacctacttgggaggctgaggcaggagaatcgctagaacccaggaaccagaggttgcaatgagccaagaccacgccattacactccaccctggacaacaagaaagaaatcacgtctcagaaaaaaaaaaaaaaaaaaaaaaactgggatggtgggccgggtgcagtggctcacgcctgtaatcccagcagtttgggaggccaaggcgggagcatcatttgaggccaggaattcaagaccagcctgggcaatatagcaaggaccccatctcttaaaaaaaaaaaacaaaaaacaaaacaaaaaaaaaactgcctgtacataataggaatgttcatcgatatcctggggcacaaaaatacaattccttgccctcgtgcagtttacattccagtagggcgggggtccccaaccccctgtgcacagactagtacctgcctgtccatggggtccccaacccactgtccacagctggcctgttaggaaccgggccacaaagcagcaggaggtgagcggtggccgatagaacgttaccccctgagctccacctaggcattagattctcataggaatgtgccaaacctattgtgagccctattgtgaactttgcatacgagggtcctaggtggcatgctgcttatgagactctaatgataaatgtaatgcacttgaatcaccccgaaaccatccccccagcccttctcccagtcagtggaaagattatctaacacgaaaccggtccctggtgccaacggttggggaccgctgcaataggggaataaaaaggctgattatccctatcatccttaccatttactgagaactaaatatacttcattcatcccttcagtcgttcattgggcttttttgtttgtttttgtgtttgagacagggtctctgctctgctggactcaggctggactacagtggtgtgacaaggatcctcctgtctctgcctcttacaggcatgagccactgcacccagctattcattggtttttattgtctgccatgtgctggggcactgacctaggtgcttggggtacatcagtgaatcaagttcactgccctagtaggtcttatattctagtgggcagagacaaatgataaaaataagttataatatgtgagagagggattagggatgtgatttttttttttttttttttttttgaggtggagtctccctctgttgcccaggctggatttggctcactgcaacttttgcctcccaggttgaagtgatcctcccacctcagttccaccaattagatgggactacagatgtgtgccactgtgccagctaatttttcttttttttgtagagacggggttttgccatgttgcccaggctggtcttgaactcctggacttaagcgatctgtccaccttggcctctgcaagttctgggattacaggcatgagccactgcttttttttgtttttttttcgtttgtttttttttaaagagagacagggtctccaactcctgggatcaggagattcacctgcctcagcctcccatagtgctggggattacatgtgtgagccactgcacccagctgaaaattttttttattaaagtgggattccagtttttttgcctatcaaatttgcaaaaaaatgtttaatgtttatgtggttagtgtaaggagattgacaatcacatattttgttatgttgaaacaatctcaaacttttagaaaagttgtaagaatagtatcaaaacctcccctcaaccaacatttgaaagtagttgctgacacaatggtctttttctacccaccctcaagatattttattatatattctctataaacctacataatcacaatgcaaccatcaaaattggaaattaccatggatatatcatgaccatctactcctcagatgccatccaaattttctgtagttgtttgaataacgctttttagcaataagatccagtctagaattgtgttaaatttaattgtcatgtctccatcaaacagttccttagtcttcccttgatattcatgactttactgcatttgaataatcctgggccaattattttgttgaatgtcccttaaattagatttgtctgtttcttcattgattagattcaggttatatacatctttagcaggaatatcacaggagtgatactctgctcccttgcagattgtacacaatttgatttgtcccattattggtgatattaaccttgataactagattaagatagtttctactaaagttctctaaagttatctttttctctgtgtaattttcattcttatttttttgagacaggatcttgctatattgcccaggctagtctggaattcctgggctaaagcaatcctcccacctcagcctcagtgtagctgaggttacaggcccaagccactgctcccagctgtctgtaatgtgcttcctcaaacactttgggcttatgcatttacttttttatcagtatgatgaactcagtggtacctattttgttcagtgtgttactatcttttactggattgtgatgctttaaatatccaagattttgtcattaagctagcttctgtggccttttgacatgacaacatcattctttgagcatgtcattactttctggcacaagaagatattccaggctcatatgtgctttccctgccccaagcctggaatcagtcatttctcttagggtacctggttctttttagtgtagaatgatatttagatttgggtgctatggtgatgttaatacagatgcttcttcacttaaaataagattacgtcccaataaatccatcgtaaattgaaaattttgtaagttgaaagtgtatacacacacacatacttacatttaaatatttttctgtattttacttatgtgaattcacatcagtatctccactttaatccaaatccagtaatacagggttcattctattcattctagttttctcctttttttttttcttttgagacaaaagtcttgccctgtcacccaggctggagtgcagtggcatgatctctgctcattgcaacctctccctcccagcgattctcctacctcagcctcctgagtagctgggattacaggcacccaccaccacgcctggctaatttttgtacatttagtggagatggcgtttgaccatgttggctggtctcaaattcatgacctcaagtgatctgcccacctcggcttcgcaaagtgttgggattacaggcgtgaaccaccgcgcccagtccattttcatatttgtaacttccttcactaacaatgagaaacccgacacccaacatcttcagtatatttgatcaatccttattgctgccgctgacccaccctcacaccctcttgactctgcttaggctctgtcaccctgcactggctccatcaccttgtaccaggtcatcttcctttgtgagcaccctcatcctatgacaggtggctgccaccatccctctcaggtttataccctcatcctgttcaggctttaaaccctgcaacaggccactactgtccctcagcattgatgccctccttaccctaaatagtttctgacatctgatgtcaggactcactgccctcccttccttcctgtatgggtgacgtccttgtgctgctgaggctttgacaccccacaccagagcaccctcctgcatgaatgtcctcagcttctgctcctagtcctggactgtctcctctacaggacaccttcctcacccaactcaggctcttgacatcccatgcctggcaaccagggttactcaccgccatatagactccatcttgctcagtctcaccttattaatctcatgtttttatttggtaaaaacaaactggcatattctttcaggagttcatttgaaccaggaattgatcctaagaaagtagatagatgtacaaaggtgtctgtacaaggatgttcatcataatgttgtttgtaatttaaaaaaccagtgttatcaatagggaatgtttttcagatatattataaattttcaggtaaatttagaaaatggactattattcaagtattaaaattgattttttttaactgatatggaaagatacagcttaagttcgggagtagggagttggtttcaaaaaagaatgattgataaaatccactgcgggctgtatagtatagagataagcctgcattccagtcttggttctatcatttatctgtctctccaatttatctgtaaaatggggatgatagtagtacacacttacaaagttgtgagaattaaatgatttaatgcatgtaaaatgatcagaactgtgtttcgctaatgtaagagtttaacattagcttaaggccatgggaatacattagcaataatatctaatgtttattaagtacttatgtcaggtactagcctcagtacattgtacttgaactatttcattggtcctcccaattatttaatgagataaaattataattactctctagatgaggaaactgagtcttagaaaggctatggcactggtccaagatgatgatgatggtccaaggctatggcactggtccaagcctggtgtttgaactcaggtagtatgactagggcttgagcttctaaccgctatgctctgctgcctcgcagaccaaaacgaaagtggtgattacctctaagttgtacttttattttaattatctctgaggtgacttttattttcgtttctctgtatcatttattttacaattctctgttaatgagtcttttgtaacaaacacgaattactttattaaacaaatataggctgggcgtggtgactataggccgggcgtggtggctcatgcttgtaatcccagcactttgggaggctgaggagagcagatcgcttgagctcaggagctcgagaccagcctgggcaacatggtaaaaactcatctctaccaaaaatacaaaaaaaattagccaggtgtggtggcatacatctgtggtcccagctactcaggacactgaggcaggaggatcgcttgagcctgggaggcagaggttgtagtgagcaaagatagcgccactgtactccatcctgggtgacagagtgagactctgtctcagaaaagaaaaaaacaagtataagttcaaagcctttttaaaggggttgggagctttgctgaactcttgttgcccaggggataaattctgattcattagcttaggccgcattgatctatgatctggctcctgcttccctctcctcatacctccactactatgcaacatgcaatcctggctccttgccaaaccatactacatgttgaatgcgatgttccctccaacatggcattgttttcaaggctcagcctcagtattttcatctcagtagccttccccaaactctctaacccctaaggcagttagactccttgttctcatagctttgtaatagcacttacccacactgtgttggaattagctattgctttctctccctagtagaatggactctttgagagcatgaattatgctttatttatcctattcctagcatgtaaccaagtatctataattcagttttgtgtcaatgataattactttattaataatgtcatacctaccacatattgttattttaggccatcattttcaattaattagcacttccttatgttagaatatacctgtatgttaaagtaatcagaagctagaataatttaacttgctttgttggtattcttgataaccaataatggcttgctacgccctgattaatctttgcagaaagcccgcttatctaccattttatttactgacaactgtgaagtaacccatgaccagctgtgtgaattgctgaagtatgcagttctgggcaaatccaatgttccaaaacccaggtatgagatgaatttaaatggtgggtattgaccagcggtttcttttttttttttttttttttacctctcccaagctccatcattcaaaccagaggtttcaaactggcttatcgacagtatttttttgctatgcagcatgtcctgaattttttatgatggctgccaagtgttaattctggaaattcctatataaaaatctacattttcttcttccaaaaactcaaagatggcagctatccctatattcccacatggcaataatttgtcaaagctgagtggtggtctccccctttatatgggacatgtatactacaatgtcctacctggcctgcttcccatatttacagtatctgtctggctactatagatattttagtttgtttcccgtgttgcagactcagctgaaataacaatgatctgtgaagaattccagttaatcttttttctttcttttacaaataaaaggcaaagagagccccggcatagtggctcacagttataatcccagcactttgggaggccaaggtgtgaggatcacttgagtcccagagtctgagaccagcctgggcaacatagcgagactcaggccctacaaaaaaaaaagagaatcttactgttctgatattgttggtgccattattaagtgtcttatgaaaaatattttgtatgtatgcaaataatacacacgtctttctgggggaggttgttatgaattggctagctacttcgagaactgtcttctccatcaacaattacagccatcagtctgtcagtttatctaaaactgtttttttttttttttggtaggttttatgtctctattgcaactacccaacttggccattgtagcccaaagcagccatacataacacatagacaaataagcatgactgtagttcaatagtcttatttacaaaaatgggtggagcaggatttgacatttttttggtgggggatggagcctcgctctgtcacctaggctggagtgcagtggcacgatctccgctcaatgcaacctccacctcccaggttcaagtgatcctcttgcctcagcctccagagtagctaggattgtaggctcatacaaccaggcccagctaatttttttgtattttttttagtagagatggggtttcgccatgttgcccaggttggtcttgaactcctgacctcaagtcatccacctgcctcggcctcccaaagtgctgggattacaggcgtgagtcaccgtgcccagcgaaaactgaatttcttaaagccagccatttgattccctggtttaggaaggaccgcagagtaggttggtatcttagggatgactttgtaaagtgagcttagttctgattccaaacaaaccttaataggactgtgaatttaaatgcattgcattttgcttggtattttactggatttgaatacaacaagtatttatctctagggatctttatttgaattctgtgcaataatggctgtcttccagttccaggcagacggtgaatggtgataaattctattaactctcactcactgcttttcctgcgccttctcccctatttcccctctatatgactgtaactgacttaaggccatctgtcttaactgtgttggtttgatttcttggcagctggtgccagctttttcatcaaaaccacctaaacaacgtagtggtttttgttctgcagggaatgagtcagctacacttttacaggttctatttggagtttggatgtcttcgaaaagcattcagacatgtaagttaagaatactttgtactaggggctgagtctgttttcccattctgagactaatacatgtgtcagggaccatgctccttggcaacctaactgaacaaacagtaggggatatagaaagcaaaaagaccttagaggcctcatgtagatttgtctctgattttctttggaaatctaggcaaactcttattcccaggttataatctgtagctcctaggttgatattgttctattttatttgggctatggtgttttcagaaattgtaaaatataatacaagctgagttttctacctctctttaaaaaaatcgcaagattgggcacccttaaaacagtatatggaactgaatagcagttgtcatctttaaaaagaggcacctgctgtccattttcccgtagcctcttccatttcctagtgacccatttcatccatttattcctgaaggcatttgagttggtgagccctaatttaacctccctgggtcaccattttttttgctttcatttattgagcacttcctgtgtatcaggctctctattaaccacggaccacctgctacacgtatcatctttaattatcacaatagtcttataaaatagatactttttaatttccattttgtacatgagaaactgagtaacttgcccgagttccagctagtaagtggtagggctgaaatttaagcccaggtgaacctgaagctgaagctctcaacctttttgccgtgtgataccatctattctgatggcaatggcatgctttccaatgaaataatagatttggaagaactttgaaaatacaaagggacttttcttgtctaagttgtatatttctgtaaagtttgtctattttacaatatataatcatagggatcagttagtgttgtgtggcttcatttacttagtcacttttctatattaaggaaacagttcttattttaaaatgctaacaattactgtctagaactttcaaagcactgaggtgacaataaaagtccaggcctttcacagtattttagctgttttcaaccatttttgtaaaacctgttaatatattttcagaaattccgcttgcctccaccatcatctgattttctagctgatgttgttgggctacaaactgaacaaagagctggagatctgcccaagacaatggaaggtatagctatgatgctggtttgatgctttgctcactctaaaagatacggatatgattgtaagtaggtttagcacaacaaaactcaattctaactagcttaagcacaaaaacaattttttttttttttgaaacgggggtctcactcttgtcacccaggtgtgagtgcagtggcgtgatcacacggctcactgcagccttgacctcccagactcaagcagtccttccacctcagcctcctgagtagctggggaactaccagcacaggccacatccccagctaattttgtttgtttgtttgtttgtttgttttgagaaacggggctccactgtgctgcccaggctggtctcaaactcctgagctcaagtgatcttcccaccttggcttcccaaagtgtggggattataggcatgagccaccatacctgggccacaaaaacagtttttttaaggaaaaatgggcaggtactcagggaagttagatagcaggaaccacagccagggttcatgtctcagaaacaatctggttagatagctaaggatacctgggtatcactgatgttggactcttatgaattactgtgaataatttctaaactgtcactgggtctttgtacccaccagtgtacaggtgggaaggaagatcttgcctttgactaatataagggatacctgctgatactactcacagtgaagaataggcaggaggtttagatactagccagctgaaagattcatgatagcagtgtgtttttcaaactgtgggttgtgtcctattggtaagttataagtaatctttttggttttgcaggaaggtgagtgatagagtagtataggacttatcagagttagttgcatatagtaaggttaggtattgttcaatgatactctattttgtgttcagaaataattaattgaataattgcactgagggaacatgaaaaagtagtgaggagtaacttgatttcttatctcctctagaaatgtgcttgcattatcctctgtcctaatccccacttctaattttctatctttctgttgttctcttcttctcatggatgcccatttttgatctgcaattgtatttgatttgatttgcactgtattttaaacatctgtgattaaatcacagagtaatcattatgagattctaggttcaagtaaaagcatcacgttgcaaaagaaaagatgtaatcaggaaaaagaaatctgacatgtttgaagagtacagcttgttggacatgctgagaagaataggaggaggtggtgatgagagacaaagctggaaaggcagattaaagccatatcctgcaggctttgtttttattttatgttttatttttatattctgtaccagccacggagagacaacctacaggctttgaatgtcatgccaaaagaatttggattttattctgtaggccttgaggagccagagaggttagggcaacttctccatcctcctaagtatttcacttcattttccagtgctaaatatcagagtccccaaggcatagtccctcgcactctgatcttcgttaatcagtctttccttcggagcattcatctgttcttgccaagtttacctattagttttctttgaatgactcctgtatctttatctctaggtctgatgccccagattgcaggcctgcattctcaactgcctgctgaatattccaattgctatttggatattctactgtcctcagtcataacatagctaaatgcgtttttctcatcctcaaataatggtctcttcatattccctcttgttggtgtcatttttctctaagacaccagtgttgaattttacagttttcttttggctccctatccccaaactgtctgcatgcctaattccctttgctcctataaatctctattcagatgtcaatttaacagagaccttctcagctcatcctatacaaaatatatgacagtaaccctttccctgccccaatatttcctatacttttctcctccttttcttcaaagcccttatcttacctgatatattacgtatttatttgtttattatccatatttccaactataagttaaatgtcatgaggaattttgttggttttgtgcattggggaattcctagtggccaaaacagtgccggctacataataaagttataaatatttaaatattttgctggctgaataattttttcaccatgttctaccagtttttcatgtatgttttatatatccctttttctccatagcttccactatcttaattcagatgctgtaacaacttctttttgaaacagagtctcgctctgtcgctgaggctggagtgcagtgggatgatcccagttcactgcaacctctgccacctgggttcaagcgatttttgtgcctctcagcctcctgagtagctgggactacaggcgtgcaccaccataccagctaatttttgtatttttagtaacgacagagtttcaccatgtttggccaggctggtattgaacgcttggcctcaagtgatccacctgcctcagcctcttaaaatgctgaaagtacaggcgtgagccactgcacttggccttttttcatcaacatttattttaagttcctgggtacatgtgcaggatgtgtaggtttgttacataggtaaatgtgtgctgtagtggtttactacacagatcagccaatcacctaggtattaagctcagcctccattaactattcttcctgatgctttacctccaccaacccctctgacaaccccaaatgtgtgttgtcatgtgtccatgtgttttcatcattcagctccctcttataagtgagaacatggtgttgtttggttttctgtttctgcatttgctgagaataatggcttccagttccatccatgtccctgcaaaggacatggtcttgttcctttttgtggctgcatagtattccatggtgtatatgtaccacatttttttttatctgatctatcatttatgggcatttgggttgataccatgtcttttccacctgcgcatatctttataatagaatgatttatattcctttagaatatacccagtaacatgattgctggctcaaatggtatttctgcccctagcagatgctcataattttttggccagaattattgtaaagccctttctagcctctttctacttcgctttctttctttcttcatttctttcctttcctttcctttcttttcctttcctttccttcctttcttttctttctttctttcctcctttttttttttttttttttaaatttaggctgggcgcagtggctcacacctataatcccagcactttgggaggctgaggcaggtggatcacctgaggtcgggagttggagaccagcctgaccaacatggagaaatcccatctctactaaaaatacaaaattagccgggcgtggtggtacatgcctgtaatcccagctactcaggaggctgaggcaggagaatcatctgaacctgggaggcagaggttacagtgagccgagatcgcgccattgcactccagcctgggcaacaagagcgaaactccgtctccaaaaaaaaaaaaaaatttagagtcaggatctccctctgttgcccaggctaaagtgcagtggtacaatctaagctcactgcagtctcaaactcctacattcaagcgatcctcctgcctcagcctcctgagtagctaagacttgcagttatgcactaccatgcctggctaatttttgtttttgtagagactgggtcttgctccgttgcctagggtggtctcaaactcctggactcaagcaatcctcttgccttggcctcccaaattgctgggattacaggcatgccatgcacccagcctctactccattttttacaaatctttgaggttgatgtttcttaaaacactgctttaattacatcacttccgttctcaggagctttttgtggctccccattacgtattgaatggtggacgaaagttaattatgctcctgtctcaactttgtttcctatgctcatctcttgcacagacctttctttcttcattactggtctactgacaaaccaagtttactctacatttctgtcttgcctggaatgtcctcttctacttatgatactttggctattttctttacaaggatcagctactcacttaggtcatcttgagcaaatattgtttgaagaaggatgtatgtgggtagaaagccagcaggaacctaagtgcccctagtaaaaagattttctccaaccctttcatagcatctacttatctgtgtattttcttttctcttctgactagtcagttctctctctttatatatatatatatatatatatatatatatatttttttttttttttttttttttttttttttttttttgagacagagcctcgctctgttgcccaggcaggagtgcagtggcacaatctctgctcactgcaacctctgcctcccgagttcaagcaattcttgtgccttagcctcctgaataggtggaattacaggtgcatgccactacacctggctaatttttgtgtttttagtagagatggggtttcaccatgttggccaggctggtcttgaactcctgacctcaagggttccacctacctcagcctcccaaagtgctggaattacaggtgtgagccactgtacctagcccagttctttatattttttagtgaaaatccttaaagcaggcggtctgatgaacttaactacttaagattttccctctgagaacatgtcttgataaggaatatcaagtcattggtcaatctatagatgatctctcttgagccaggtcatacccttaatccaatcagtaatggtccctggttaaagaacaagcttttgctgcttaaataggtggctgagggtggagtatatttagctagaatgaaccataagggagagacaggcactgtaaagaacaggttgaatataccaactatctgaattctgtcttttttttaagactcaatcttttcctttcttgatctctgacactctattgtgaagtatattcctcctcctatccctttactgttttagctcatttgggacttcattttctctgtgttttttttgtttgtttgttttgagacggagtctcgctctgctgcccaggctggagtgcagtggcgcgatctcggctcactgcaagctctgcctctcgggttcacgccattctgccacctcagcctcccaagtagctgggactacaggcacccaccaccacacccggctaattttgtttttgtatttttagtagagacagggtttcaccatgttagccaggatggatggtctcgatctcctgacctcgtgatctgcctgcctcagcctcccaaagtgctgggattacaggcgtgagccactgcaccctgcctttctgtgttcttataattgtaatagattgcaagcccctaaatggttggggctgagttttatacatcttttgatcttccttgtgcttagcctatacaaccttaggagacatttcttctagggttcttaaacacacattctaatatacgttcaattgtttttctttcagggcctttaccttctaatgcaaaagccgccatcaaccttcaggatgatcccatcattcaaaagtatggctctaagaaagtgggcttgaccagatgccttctgacaaaggaggaaatgagaacgtttcactttccattacaaggttggcttaggcttactctgatattgctaacaatgtaagaatatctaacagcttatttaaatactactgtttgagattcatttatctggctgttttctgagtggcttattcttatttcatcttctattaatgaggaaatatcttcggcacagtgtatctcaaaagtgtgtgatgtctaccgtgattggcaaagtgatgattttaggtagtacatgaatgtgacattaaatagcattgaaataatatttaataagaaagttattccctttccttttcattcagttttctttcatttcttcttaatatattaaaaacagtcagtatgtctttaacattttaacacttttccagtacttctaattctcctcccacactgcccccatatttctttaacaaatagagcaggtctaggctcggagccttggtcaattatatagcaagaatttaataaaagtactttgatttcattttattttctttgttacctcctaattatagcaatgataattaaatttccttttttaaaaacagatataatttaacataccacacaattcacccacttaaagttacaattaagtattttttactatgttcacagagttgtacagccatcaccacaattttagaacacttctatcatcccaaaagaaaccctgtattataatttccctccaactccctgagcctttgacaaccgttaatctagtttctatatatagatttacccattctgggtatttcctgtaagtggatgtgcaatatgtgggctttgtgactggcttctttaacttagcataatgttctcaagcttcatccatgttgtagcatgtatcagtactacatttattttcactgcttaatgatactgcattggatagactgttcatcaggtgatggacatttgggttgtttccactttttagttaataatgctgctatgaatattcaggtccaagttttttgtgtgggcacatgctttcatttctgttgggtatatacctaggagtataattgctgggtcatgtgacaactctgtgtttaaccttttgaggaactgtcaggctgtgaaagctgccgtaccattttactttcccaccagcagcatatgaggtttccagttcctgcacattcttgccaacatttactattatcttgtctgaatatatccatcctagtgggtatgaagtggtgtctcattgtgattttgatttgcatgtttctgttggctgatgattttgagcaacttttcacatgcttattagtcatttgtatagcttcagagaactgtctattcagatcctttgtccatttttaaattgggctgtattttatcatggaattattggagttcttattttctggatgcataaattttatttttttaattttttaagttgatgtaggcgtgttttataggtgccaggcaccgtactaagtgcctttttgtacattaactggcagtcctatgatatatgaactaaattttaactccattttatacatggcttttttctctatttattttaacatatttataaccatctttttcttgaggttgcactactgtcacatgagcacgtagtaagggcagtactgctaacacctataaaacaccactgataatatagataaggtaggcagcaaatatagtgtctgtgagatttgaggctgcctttcttctctgggatagaccatcttttgattcttttcattgcgattagttggaaatttcacagtaccgggaatcagaaattggtcaaaggtttgcatagccccctttgttccgtgtcaaacaagatttagatgttacctttactgctccagcctctgcctgaaggtagaaatcttcaacaattcagatgcttttgggtttttgagctaaatatgcatggttatggactcagggttcacaaatagagggagtaccttaaatctatagctgagcctctgtaggaaatatgtgattccagaaaatgcaggcaaggctctgaataggtgtttcagaggaatctcacaggttgagttgggtggagggacacatatggtgaatgttacttaaactttcttcctactatgaaatccttttagatctccattatggtggaatctcattcctattttctcttcctgtatttaggaaagaaagatgccacatacagttatttgcatactttattcattctttcttagtgctgacatggaaagcgcctaatgactttgggtttagccatgatttagttatctcttttctcatgaggaggaaaaattgttacttggtaactgccaggaagttcaagccccagaatctcctcctaacagcaagcctacattattctttcaatataaaaatgagtagatggagaaaaacttgaggacagagattgtatcttatttagtcattgtatttcaagtgtctaacataccaacatatctgactaaaatatctagtattgtagttttacctgcttgaatctaagagtgatgtttaccatctctattctaaaggcaaacattttcttcctttttctcctaggttttcctgattgtgaaaactttttacttaccaaatgtaatggttctatagcagacaatagtcctctctttggacttgactgtgaaatggcacgtactacttttaatttttcaattggagtgttgcaagctgaggtctagtagaaaatgatttcttgagtctaatgcactaatgaacgaatacattcatttttagtattctgttttaatagctgaaagtaggtccttttactcacactttagaaaacttagatctgtattccaggataaagaataaatatcacataagtggctgggtgccgtggctcacacctgtaatcccagcactttgggaggctgaggcgggtggatcatgaggtcaggagatcaagaccatcctggccaacatggtgaaaccccatctctactaaaaatacaaaaaattagctgggcatggcagcatgcacctgtagtcccaggtactcgggaggctgaggcaggagaatcgcttgaacccagtaggcagaggttgcagtgagctgagatagcgccactgcactccagcctggcgacagagtgagactcgatctcaaaaaaaaaaaatcacgttttccaactagttactatgtttaatcaggtctttgcatgttgctagaagttgattccttgtgtttgaagaagtattttgttgttgctgccatgaggactttgccttaattgttggtttggcttagttttacaccttgaagatcagaaataggatttccctgcttaagttcccctcgtgctttgctttatctaattgtagtaagcctcttttcaaagacagtgcatcccctctcagtactcaggaaacagtttctcaattcttaatagagtaactaagacctaaaatttgagaatctgacatatcagggtgtatatcctgtccttgcctgttagtggctatgtcgccttagacaaatacccctaacctatcagcctcggcttctccctctgtgaagtgggggtaataataaagcctacctcaaaaggtaattatgagagtggcatatataaaattcttagtacagcactagctgataatagaatgggcttcataaaaattacctattagtggtatttagcataatactggatatagtacacactccataaatggtagatacaattattaatattatttgcattcatcttctttgtgcagactacactgtgttgatcctcttaagtgtaacattcagcagcctgcccagctttaatttcactcacactagatcctctagaaagcaagtttgtgccattgctgcagggaccctggtagattacagtagatggcagttgacatagtgtaaatagtaagaagaagcaataacttccacagttcagcagcctgactacatgttggtctttcagtgcctcacatccaaggggagagagctaacacgcatctcactggttgctgaaggaggctgctgtgttatggatgaactggtcaaacctgaaaacaagattctggactacctcaccaggtatttttcaccttgcctgcagctcttctaagagctatcgggctagaatggaataatacttaagaatggcccacagcttcagtttagttaggttttatctacttaaatattatcaaaggttagggcatcacataggtatattttaatgctgaaattgcacaatgtcagtgtataatgctcttgcccttcttgatcttcaatcttcttgtgaccttaagtcagcagaatattatcttccttgttccagaatctcccaattataatcattatctacaactgccaaacagctagagctttgctttctgataagacctcatctgaaaatctgcaagtcatcatttggcagtcaagtgatgttagagcttaatctgccttgacccccaaaacacaaacaaatatttttcataacagaaatttgaagctgaaaatgttagtctacttttccaaagattagcatgtaatctcagaatgtacacacagtgactaggcaagaagccagtgaaacattactgttcccatccgttgacgtggcaccagtagattcgtgatgacttagggacagagaggcaatgatagtgataaatactgtcctattagcagacttgacaattagattcttagagaacagtcacgtgtggcaaagttgtatgcacaagcatgtttgtcacagtattgcaaaaatgtgagtatataaatgtctgaaagtaggggattagttaaaatatgctgtatctgtataatggaatactctgtaaccatttaaaaggatgtgctaaatagatttattgatgtgcaaatgtgtttatgacatattataaatgatagattcattgtaaagcagctcatgcattatgattacatttttataaaaattaaatatatacctgaatctatatcaaaagtatggaacgacatttactaaaatgtaaaaaagcaatcatctctgggtgataggattatgactaatttttaattcttatttgtcactttggacactaagcatatatatattaacagtaattttaaaaaatgttatttttaaaatcactttccagagaggaaaacttgttaatatcctagcctgtccatttctctttttttaatgaaagcttttcgggaatcacgaagaagattcttaacccagtgacgaccaaactcaaagatgtacagaggcagttaaaagcactgcttcctcctgatgctgtgttagtgggccactccttagatttggatctcagagcactgaaagtgagtatctgatttaggactttgcattttcagtataaatgcctgttccatttatctcaaatctaaagtcttgggctcttctctcccaccctgctagcccacttgttttttcctttagcataagacactactcattttattctctttcttcctcagatgatacatccatatgttattgatacatcgttgctttatgtcagagagcagggcagaagatttaagctcaagttcttagccaaagttattttggggtaggtttgcttatatgctgtaatattgttctgacaaactgcatacaagttagcatgtagtatctaatttaatgcatattgcaaaattcagggtttctgctctctttgctttaaacatgtttttttgcatttcttatgaaatgaagaaattgtagcaatagagacaggggtttacattcacagtcgaggcttaatggacagaactgaaccatgaaggcagaagaggtaaccaaaatttcaaaacataacatacctatatgcctatacaaggtagtataacatacttatactgtcctattgtattaagacacatatgtacaaaggtgttcattataacatggtttaaaatagcaaaatagaaaacctcaaatattctagaagtctggttgagtaaattatggttatctgtattattgaatattttgttgttcagaagaatatgataaatctgtttgtgatatgaacacctctctaagacactcctgagaataagggatgcagagcaagatctatatatgcctcaatatttatatgatatagattagatttagttctatctataaatatatacatatattaagctttttaaaaacacctaagaaagtatttaagtatgtatagacacttatatacaaataaaaaagtttcaggaaggcaactttaaacaatggttagatctgagaaatgggcctggtccatttcttagagaagggcctggccagggagtcagccagaaactttttgttgggtagccttttgtccggatgctatgcttgctgtgaacaaagctattcctgattgttttgcacccccagttcctctcgcagggctgggcaattagctggaataaaggaaccttgatttttgtgatgcaaatctaattatcagaattctaacattttatatgtaatcagaacacttgagatggttgaaaaagcctatcattaaaagtgcttccagtatgtcaattttatattgactttccaggaaggatatacagtgtccagacagacttggtcatgatgccacagaagatgctagaacaatccttgaattggctcggtatttccttaagcatggcccaaaaaaggttagtatctttgcccagtgtgttcaccttttcttaaaatcatgggactagatcagattatcacagactaccaactcctattatctatttttatgaaaatggcagtgtgggccaggtgcagtggctcatgcctgtaatcccagcactttgggaggccagggtgggcagatcaccaggtcaggagttcgagaccagcctggccaatatggtgaaaccccgtctctactaaaaatacaaaaattagccaggtgtggtggcgcgtgcctgtagtcccagctactccagaggctgagacaggagaatcgcttgaaccagggaggcagaggttgcggggaggcagaggttgcagtgagccgagattgcaccactgcactccagcttaggtgacagagcaagacttcatctcaaaaaaaaaaaaaagaaaagaaaatggcagtgtgattgaatcctaaaaaaagaaaatggcagtgtgattgaagcctagcatgtatttcgaattaagacccatatcactagcataatgtggttaagtatatagtccctgcagttgggcttatctgttttaaaatatatgttctactatgtctagctgtataatctagggcaatttctctgaacaacatcagtttttggatctataatatgggaatacacacttttctgggatattgttgagagtaaatgagatattgtgtataaaattcttagcacagtgtcttgaatatactaagcactatcctggtggtgtggtgattattgtagttaatactaataattataaaaaatctgcatagatttttgttttcttggagtagggggagcatacaattgtttcaacagcagttcagtgggtaaatgttagaacaacacataagggagacatggaagaggacatagtctctgacaaactttattataatgcattctaacctattagattgtcccattgcatagtacattccatcatgactccattatgaaataaattgtactccacatagaataataagtaacagccagaatagtcttttgtgtcaggtggtagaaagacattctaacagatcttctttgagcatatagataataatagccaccactcactgaggtcttaagtgtactgttctaaaatgctgtatatacattatcttatttaatcctcacaacagccctgtgagttagctattatcattccaattttatacatgagcctttcgaggttaccaaaggttagataacttatctgaggtcccacagtcagtcagaggtggaaccagaattgaaacccaggtctgtcacattctgtcttttctgtataccagggattagcaaactttttctgtaaaggccaactagtaaatattgtaggctttgcagatcatattgtctttattgcagctactcaacttgctgtggtactgcaagagcagccatagacattatgtcaacactggtgggcacagctgaaataaaactttatttatttacaaaaaaatatgtattggtgtctgctaatctctgctctaaatcactacaataggttctaaaacccttttggtctcatgactctttttatattgttacccacacaatggtgtgttcagtcacttagtgggtgttaacccaatgaccactaccaaggaatatttatttttatttttattttttttgagacagagtctcactctgtttcccaggctggagtgcagtggtgcgatctctcttcactgcagcctctgcctccccggttcaagtgattctcctgcctcagcttcccgagcagctgggattacaggtgcctgccaccacaccttgctaattttttttttttttgtatttttattagagatggggtttcaccatgttggccaggctggtctcaaactcctaacctcaggtgatccacccatctcagcctcccaaagtgctgggattacaggcatgagtcactgtgcctggcccaagaggatttaacaaggggattttattactttgcaacaagtaagaacaccagggatagttcccaaagcactatctccccaaatgaaggcaaaagcagggcttttattttgctagtcggctgagtcattgcatgtaaaggcagggtttgttccttgacacatacatgtatagaaaatggagaataagttcctccctaggtgagatttttagtatggtaatgcagagagtttgccaagttcatctctaacttcaggcatctctggttccagctggtttttatcttgctgtagctggtggtcttcctgtacccttttgaaacaacaaggtgcaacaggggttacacttttatagtgtgcacctgaagacccagggactctgggttacaatatctatcaacatttaccatattagaaattaaataaatttttaatattagtttaagataaataaaaagccattatatgttaacacaaatcactttttttctttttctgttttttttttttttttttttttgagacggggtctcactgtgttgcctaagctggactggaactcctgggctcaagggatcctcctacttcagcctcctgagtagctggaacttaagcatatacagccactctgtccagctacaaataacttacttttatggaaaaaagaattttccataaaaattagtggaaagaacatcattgttttaggtatttttgtgaaaccttttaatatctagcttaatagaaaacaagtggcttttcatatctgctttcacattcagtctgttatgtcacatagttggagaaggaaggacctcaccccttgtgagaagatgtctggaaaccccaggattctcaaaccacacttggggcacttaattatgcttgatttccagtgaaaattgtgtctcacttggataaaaactaaccaaatctgaattaagcatgggcttaattaataataatgcattactattggttcattaattgtgacaaatgcaccatacaaatctattactaataggtaaaaatggaggtatgctatatgggaactctgtactattttcataatttttctgtaaatctaaactgattctaaaaaaaaagtttatttttaaaatttgtaactttaaaaattattctctctacatcacaactccctggtgggctcccactttacggaaggagaagaaataactagaatagacttct[450 bp omitted]gattgcagaactaaatctagaagcactagctaatcaccaagaaatacaagcagcaggccaagagcctaaaaacacagcagaagtacttcagcacccaaacacaaggtaatattttcagtttgaaacaagagcaaagacaaatggagtatctagtttcttatttaacaacacctgagaatgtttttatcctcttttgagtctattaaaaactatttaccaaaaaatgataacatctatcacaaaaaccacggaaaaaataccaccttctagccttaatatatagtatttaatttctaattttctgaatctagtggctggtctaaaatgatatccttgatcaaaaaaaaaaaaaagaaaaaataattggaatacgttgaacctaggtagcactgggaaagatgatagactagttggtattttggctagaagagtcaatctgtagccttgttgtattgcccagactatgaaagacacacacacagactcaaaagggctttgtctccagactatagcaaatgtatcagatctttagaattttgcctaatcttttgatagagagctttgggtatatttcttgtttatccttcctctctctattgaagcaacactgtccaaaacaattttctgtgatgatggaagtgctctacatctgtgctatctcgtttggtagctgctagtcacatttgactagtgcagttgaggaactgaatttttaattttatttaattttaattttaatagctatatattgctagtggctaccatattgtataatgcaagtatagagaaataactgtcaggttctggaaaactgttgttcttaccttaactcttctacttctttatagtgttttagaatgcttggattcagtgggtcagaagcttctttttttgacccgggagacagatgctggtgaacttccatcttccagaaattgtcaaactattaagtgtctttcaaataaagaggtgagtggcctgctgaacctttgcaggttatattcaaagcagaggggaatgtagccctttgcacccatgccagtgtcaagctttttttcatcagcaaccctggctacagttagcaagcctggcttgtgtctcacatcttgtatggagtacctaagtcctcataggggcagaactgtcagctgccaatgcctgcttccagagcccagcaggcctctggctttggtcttgcatacatctttgagtttctgttgtgtttctggttcatggaaacgtttatcttggttttgagcctggctatatcctttcgattttttctttttatattttatgtatcattgctgtatgttaagtcagagaggctacatcaaacatgagcttattatgttatcatattcagaagatctgtgtttgtttttttttaacattttgtttgtaaataatttcaaccttacagaaagcgtgcatgaatggtagaacacctgtatactttctgtctagattcaccttttttagcactctgccccagttgctttattattttatatgtaccctcatgcttatgctctctcatgtacacactctctctttcttcctctctgtatggcatttcctgaaccatttgagagtaagctgcatatatcatggccctaaacacttcagagtgtatttcatgagaataaaaatattattttatataaccacatcttaacatagttaccaattttagtaaatctaatattgtcctggtacctttatctacttgtcatctgtattctaattttcttggctgaccaaataatgtctttatagcatgtcttttccctttagaacagtatcatttctagggtcatgtattacaattacttgtcatatctttttagtctcctttaaagctgtaacagttcctcaacctttctttgtctttcataaccttaatactttttgagtaatgcatgcccccctccctttcttagcagagttgcttattttaggtttgtgtggtgtttgctcatgattaaattcagattatgcattcttagccaaatttcttggggtgttgcatccagaggcagttattactcatctgcccctcttttgtgctgtttattttgatcacctggtcaaggtgttgtctgctttctctattgcagagttcttgttttttctcttaattctaataaatatgtggggagatattttaagaacatgccagtatcgcttgagcgcaggaggttgaggctgcagtgaactatgatcgcaccactacactccagcctgggattacaggtgtgagccaccaggctcggccaagtgttcttttttatgcgtcttttgcttgagcttgttgagcttttgcaatttgcgggtttatcatttttatcaaattagaaaaaatgttgaccattatttctccccattattttttctttcaccaccctcccctcctttgggcactcccattgcatatgtattaggccgtttaaagttgtcccatagctcactgatgtgctgttcatgttttttccagttttttttcctgtctgttttattttagattgtttccgttgctatgtcttaggtttctaattctgctgcagtatctaatctactgataatccaatccagtgtactttcacctcacacattgtattttttacctctagaagttaacttttgttctattttgtatcttccatgtgtctagttaacattcagactttcctctagcttcttaaatttcagaatatagttacaataactattttaacatccttctctattaatttgataatctgtgtcatttttagattaactgaaattgattggtttttctccttattatggactatattcattcttctttgcagcctggtagtttttgtattggatgccagacatagtgaattttaatttgttgggtgctatatatttttgtatttctataaatatttgtgagctttggtctgagatgtggtaaagttacttggaaacactttggtccttttggatcttctttctttctttccttccttcttttcttatctttcttttcttttctttcttatgttgcctaggctgatctcaaactcctggcctcaagtaatctgcccacttcagcattccaaagtgctgggattacaggggtgagccactatgcctggccagatccttttgaattcttgcttttaaggtttgttaggtgaaaccagagtaaattttgtcccactactgaagcaaaaccatactaagtacttaatctccataaattatgagattttacactctagcttttgggaatctaaaccattcctggccttgtgttagcccttgcgattgtttcctctaatccttttgggcatcctttccttgacctcgcatagtttacttacatggatacactaatccctactcaactgaatatttgagggggattatttatagatctatcggtttcctatctttaaggatcactgtccttcattttccaatatcccgagaactgctgttcttaggaattttttttttcttcctgagcacttacatgggcctcaagggctctttgggcattattattgttattttaatagacttttatttttagagcagttttaggttcacaacaatattaaatggaaagtctaagctgggtgcagtagtttacacctgtaatctcaggactttgggaggctgaggtaggtggatctcttgagtccaggagtttgagactgacctgggcaacatggcgaaacactgtcgctacaaaaaattagccaggcctggtagcacatgcctgtggtcccagctgctcaggaggctgagatgggaggattgcttgagcccaggaggtggaggttgcagtgactgacgtatgatcgcactactgcactccagcctggcaacagagaccctgtctcaaaaaaaagaaagtacagagagttcccatttacccccacacccacccacacaaacaacttccaccattatcaacaacctgtacctgggtagtacatttgttaaaatcaatgaacccactatgacatataattaccaaagtccatagtttacgttagggttctgtcttggtgttgacaaatgtatagtgacatatatctaccattatagtatcatacagaatagtttcattggcctaaaaatctgtgatgaatgtgctctgcctgttggaaaccactgattttttttttactgtctccataattttgcctgttttagaaagtcacatagttggaatcatatagtatatagctttttcagactggcttctttaacttagtatatgtatttaagttttctccatgtcttttcactgctttatagttttttttcctttttaacactgaataactatacattacctagatttaccacaatttatccattcacctgctgatagacatcttggctgcttccaagttttggcaattatggacaaagttgctataaatgtctgtgtgcaggttttcatgtgtacataagtttcaaacacatttgggcaaataccaaagagtacaatttctagattgtatagtaagaatatgtttagtcttgtaagaaactgctgaacttctgaagtgtctatgattttgcattcccaccagcagtgaatgagagttcctgttgctccacattcttttcagcatttgatggtgtcagtgttttgttggattttggctattctgatggatatgtattagtatctcattgttttaatttgcagtcccctaatgacatgtaatgtgaagcatcttttcatatgcttatttgctatatgtatctcttctttggtgaagtgtctgttcaactcttttgcccatttttaaaattggattgttcattttcttattggtgagttttaatagttctttgtatatttgggtaagagtcctttaacagataagtcttttgcaaatattttctcccagtctggcttgtcttctcattctctttatcgtatattttttatagtttcttaggtgtttgaggagagagggtaactctactctttgttattcagtcttgactggggatggaaatccttgtaagttgcatttgagaaacttaatggcaatctaattttcttggccttttaagttacttttactgaggatttatttttcccgttttgtttaaagtctaattgttttactaagctatgtctcagagttgatcattccaagtcactttttattggtacccaaggcccctttcaatatttaggttatagtttcttttatttccagaaggttttcttggattgtattttcaagtatttggttccattgctttaattttcttcctcatggacttcacttatgcatatatgttgttccccgctggcctatctttcattcacctactttctctctgatccttttgatttcatttgtatactcctaattctttccatgcttttcattaatgccctttattaaaatttcacttgaatctattctttcttgacaacttgtagttgctttttcatatcctcaaatgcttggctgctaatattcaattcagtttagaccgtaatgttaactgtatcctttagccccatggttgatttttttttttagggggaataattttcatcagctgaaatgcttcgattctcactttatgtcttggcttttgtttttgtttttgagacagggtcttgctctattgcccaggctggagtgcagtggcgtgagcagagctcactgcagccttgacctccgggctcaagcgatcctcctgcctcagccacccaagtagctgggactacaggcatgtgccaccatgcctggctaatttttaaattttttatacagatgaggtctcattatgttgcccaggctcgtctcaaaactcctgagctcaaaatatcttcccaccttggcttcccaaagtgccaggatcacaagcatgagccaccgcgcccagctgttgctgtttttttaatagtagtttagattaatatggtctactattttctaattttactgatttgtttttgaacaaggttttcattcaagagcatctcttttattctgccttcctcagtgcagttttttcttctttttttgtgcttttcctctacttatcaagggattctctctccctttcctctcctgcctctcttcttattgtagtaaaaaacataaaatttaccatcttaactgtttttatgtacatagttcagtaatgttaggtatatttatattattgtgaaagagatcttataacttttttattttgcagaagtgaaacttgggctatgtttctttgtatgccttgtgacttattgttgttggtattgttgaggcttgggcatttgaataaatacccagttgttgtctttacagactgcttcgtgcaggggaagaccttcaccaatcagcctagttagagatttcatgacctcccaaacctgttctggagatttgtcttctctggggttatgcatgtgcctttagttgttccctgagccccttgtccctacttcttttcagagcccataatctctttcttcccctggtttcttactgcagctctaacatgccatggtgatcacatctgttttcagtggcttccaaacaaggccttcttcagtcctgtcagccttccgagtcacgcaaaacagaaaatagtccctcagacagcccccacagtacccagaacattggacacatggtcccctcttttttttccatcccaagagaagatctgtggtgtggaagaagccatattatgtcagatagggagaggtgtagatgggaccacaaaacatcacaaattttcctttcccatttactggaaacccttcttggtttcatgctggtctaggtgctatatagtttctcatggaatctctacagttctctcaaaggtgttctggtccgtatattgttgttaactcattgtttctgtgagagtgagaggctgaagtgaagcttcctagttctccatttccagaatgatggtgtggtgttgagggaagggaggaatttataatattgttcagaagagttggcattcttcacagcagtgtctccaaggagtaccaccttttctctatatatctgattcttctccagaagcatggcttctctgaggctgccaagcctcttgcttgtagtcaagtgctgagaactgtcaaaatcatgacccatgttccttatttgacatttaattggagtttttattttggggtttttttatgcttcatctaattcttccatgccccttgatttttttttttttaaccaaatctattaagcctcctctcccttgctttccctactcacaggcttgcagcagtttacaatagtgggagttacacttatttatttaattacaggtcatttgaaaatttttgtaatagcccttgtctcttagtaatgccgaaggtatggctcatatgtattttatttttattctttttattgattctgtggttctttggggaaggtgtgtggtttcaccattttcctgcagacctggaagtcagccccatattacctttcagtatgcgtaaaaagacaactactgtttatattattgtggctcatatccaggagccacaatagagtatgaggttcctaccttatccaggctgtgctgttctctacaggttcttgagcaggccagagtggaaatccccctgtttcccttcagcattgttcagttctcttttaaggccttttcacctgtcctcactgaggagatgaacaaaagggtaagtgaatgggttctgctgaatgatttatttagtgacttattataacctctcatcattaaggaaagtaatacatgctttatttaatttgttgtgtttttctctagatttttactatctgcatattaacatttaaaaatatttttatgaaaatgggaatcagactatgcatactgttttgcaactttattttttcatttaacagtatatcatacatctttctgtatcactacatatcttatttcccttgtttttaatggctacatagtattctgctatatgatatacctattaacatttgtgctttatacatttttgctattacaaataatacttcagtgaacatccttggacatttggcaagtatttatatcaaaaaaatctttggtgaataatcccatgcattgactcatgatttcagttctctttccatattcattcccatactatattctgttgtttttcctacagatgaggatcaagtggacagagatatcaactgtctatgctgggccatttagcaaaaattgcaatctcagggctctgaagaggctgtttaaaagctttggcccagtccagtcaatgacttttgttcttgaaacccgtcaggtaagaccggaaaattcagatttcattttctagattagtgttagacattcaggtgactgcttgggccatgcagatagcaaatattcgtaaagtaagcttgattgctaccaactggagtgtgagacatactctaatgagagcagttgttgacccacaagaatgtatacccagtattgtgagatcttttgttgtgtgtgtttaaagaattgagaaatctggctgggcgcagtggcctatacctgtaatcccagcactttgggagtttgaggagggaggattgcttgagcccaggagttcaagaccagcctgggctcaagcaatgtgagaccacattgctacaaacaatttaaaaacaagaattaagaaatctgtcagttttcatatgttggctcccatttctcaaataccaggccatacgaaaaaatatgtctgctggttgaatataacctgtggtccttatgattgtacctcagctttaaatgataaaatactctttcaaaaagagaagtaactttcatatcttagaaagttacttctttttttacattacagagtaggctcatggcttgcttggttaagatacaggaggaagattatgggagggcttttgttgttattgttatctcttatctcttagggtaagtttttggtattgtaggtttgtatttacataaaagccctttaaagagattagttttactttaacaaaaataatacttgcatatggttttaaaaatttatgtagttcaaaaggacttcacaagttatgtctccatcttcacagtcataacaataccatatcaatagataaagtttatatgtgaagcaataacatcataagcatatagagacatggaagaaatcatgaaaagaaaaatggaaacagtgtaatgtaggatgtttgtagaatgatatacaataaaggtaacaatggaggcctctagggggaagaattaggcagctagctaatgggattaggggaagacttcactgtaaatatattgttcctttagaattcggaactaggtaactattaaactggtgtattacaatgtatgaaagtgaagtaaaaacacttctaaagtgatctaagtgcaggatcctagatattttaaaatggctgtctctaaattttttaatttaatttttattttatttttatttttgagacagaggcccaggctgcagtgcagtggtgccatcttggctcaccacagcctctgcctccccagttcaaatgatttctcatgcctcagcctcccaagtagctgagacgacaggtatgtgcccccacgcctggctaatttttgtatttttagtagagactgggtttcaccatattggccaggctggtcgcgaactcctgacctcaagtgatccacctcccaaagtgctgggattacaggcatgagccactgcacccagcttccaaatcttttattaatggcttttctatgactaaaaataaaaatacaaagattgtccctgagaagatggattgggggatgagaagtgtatagcaagggactataacatcttcctttctcttggcccctttttttggttgcgggggtggcgggtaaaatacatataaaataaaatgtacctttttaaccatttttaagtggcattcagtatgttgatattgtgcagctatcatcaccatccatctctagaactttttcatcatcccgaactgaaatttcctattaagcaataatttcctattacccctccccccagcccctggtaatcattgttttactttctgtctttatgaatttgactactctgtgtacgtacctcacataagtggaatcatacaatatttgtccttttgtgtctggtttatttcatttagcatgtcttcaaggttcattcatgttgtagcatgtattagaatttcattttcaaggcaaaataatattccatttcatgtatataccacattttgtttatccatttgttgatggacatttgggttgtttcttgtttctaccctttgttttgtttgttttttttttttttgagatagggtcttgctcacccaggctggagttcagtggcgtgatcacaactaactacagcctcaacctcctgggctcgagcaatcctcccacctcagcctcctgctgggaccacaggcatgcacgcctggctaattttttgtaagacagggtctctctatgttgcccaggctgatcttgaactcctggactcaagagatccacccaccttggcctcccaaagttcttggattacaggcgtgagccactgtgcctgaccctgggttgtttctacctttgactatcatgaataatgctgctatgaacatggttgtacacatatctgttcaagtccctgctttcagttcttctgggtgtatacccagaagtggaattgatggatcaaatagtaattctatgtttaattttttgaggaaccattatactgttttccacagtggctataccattttacattcctaccagcaaagaacaaaggttccaacttatctacatcttcactgacacttgttttctattttatttaatagtagccatcctaatggatgtgaaatggtatctcatttgggtttgatttgcgtttccctaatgattagtgatgttgagtgtcgcaggcaatttgtacatcttttacagcaaagtctattcacttgtttgccctttttttcttatttatttttttcagttccagctactctgcagtgtttgcccatttttaaatcaggttgtttggcttttttattgttgaattgtaggatttctctgtacattctggatattaatcttttattagctatgtgattgcaactatttctccattctgtgggttgctttttgacactgctgttagtgtcctttgatatacaaaaggttttaatttttatgaagtctaatttgtctatttttaattttgttgcctgcctttgatgtcatattcaagaaaccattgccaaatccagtgtcatgaaacttttctatgggaaggcttttatctccatattgatgctatggctcagataatcacaaagatttagttactccgagttaacaaacagaaaagcagaccatttgaagatgtagcctatccagtggaagaacttatccttcccaagcttataaagttaagccaaaagacaaatgggaatctctgcccgtgacttgcagtgatgactttagtgatgcataataaatattatgaaaagcctgttgggtagttccattttaaatgacaaagttatttgttgtctgaaagctagtttctgaactttgatgatcccatttaaagttgacagtttacaatcaatacttgtgtagcccagcacagtaaaggcatccattctggtggctttggccactgtagtttgaatcctttccccaaccccttctttagcagtttgagctggaaagcaatgatgaggaaatcttggtctttctgcagcctcatctctgtatacagtatgaagtcctagaagctgcccagctggccatagaatccttggatggtattctggtagatggtatctgcatcaaggtagggtgacaagagaaagccccctttgcttgggtctggcctaccacagcctgtatttatagtgccccaggacatataggaaacactctcaagaggcccacgcacaagactttgttatggaaagtcttcagccaagtctaacattctcctactggcagtgattgaagacataacggctttcatttgtgtcagaaatcatcctgggctagatttgggtcttccttgcattctttgttactacttaagtcccctgtggtttattctggttggttctttgtggttacccttttcttcacctttcagggagatcaaatggtggtattttgaagtttcttgtgcacataaacagaatttcattaagggtgggaggcaggaaactgaagagaatatgtttacatgaaaatatgtatttatcaattaagtctctaacataattctgtgaggccattatctttagtttccttttacagaaaagaaaagaaacggaaaattttaggaaactgaaaaatgaagttattagtaatggcaacaacttgctagtatccaataggcctgaggattaaattgattttctaccactaacaccaactttccttggttaggtgcagaggcctgtgacagagctcacgcttgattgtgacaccctcgtgaatgagctggaaggagattctgaaaaccaaggctctatatatctgtctggagtgagtgaaaccttcaaagaacagctattgcaggagccccgcctctttcttggcctggaagctgtgatcttgcctaaagatcttaaaagtggaaagcagaaaaaatactgtttcctgagtaagtctatgctactgaatgtagctttggggaaggaaactggggatggtgataacatgaggtcagagaaaggaagattcacctcctgggctggaccagggcagcagttcctgattctgtccttctcctttgaccctggccaggcagcttggatggtgatcagctttcttggcccttaataacataaggtgggggttcttgctttcagaattcaaaagttttggcagtgcccagcaggccctcaacattctcacaggcaaggactggaagctgaaaggcaggcatgccctaacccccaggcacctccatgcctggctcagaggcttaccacctgaatcaacaaggctcccagggcttcgtgttgtacctcccccctttgaacaggaggccttgcaggtgagtgagtgaaggcgtcttggagaagatgtcaggagagtcctgctcagtgacacttaatcctttaatcttttttttttttctaccctggccctcagtcttatttcactctccagcttcctccagtcctggccacatcttttctcgcagatctctcatacttttgcccccaccatacctgctaaacttagttttttagtcttccagatctccaagggactttgaaggacaaaggcaggaagtcagagagctggacaattattcagtgatctagtctagggtttcccaaagtgtggtatatacacaagataaattgtggttgtcatagatggtcttttcttttttgttttcacttttatgattatggacttgtccgtctttttattatatctaagacatctgaatggacttgttttgctaatacttgttaaagtatacaataactacattgagcctatgattttgtggatggcattagttagacaaggctaaggaagaaattaactcactttatggaaaaatgttagagggatatacaagcagaagagtggaggtagaaggtaaatggctgaagcttgggaaaccctgtcttagtctaatctctcatacttaacagatgaaaagtaggggctagagttggtaagtcacttgcccaaggtcacaaagagacttaatggcagaagccagactagacccctcatcagcaatgtggctcccctagcttggggtcttggaagacccatgtggaggaaaggacagtagctgtcctcccctgaggaagtccttagccaacttggaggcctggggatgctgggtcagcagagaacctgcagtgtgggctccagtgttagaaaagggatttgtctggaacctttactggaatcccatagccttagaggcagaggaagagtgttgcagcccttccaaaggtaacgagagagtgttctggctgagtatcgacacatggctttgatcccagactctgaaactggaccacccgaagatagcagcctggcgctggagccggaagattggaaagctctacaacagcttgtgcccgggcactctctgcctcatcctgctgccaggaaccaagaggtaaggactagaaagggtatcccttcaggactctgtcccctggatttcagctgttcttagagaaaaagccttttgctgatatttaggcacatagtgaggacttacatgaatcatctctttaattttcaccgttctaaaagataggcattgtattcccatttcacatttatatgctcttgtataactacatttattggtccctcaaggagataatttatccccagttaaaaccaggagtcttatgtccttactgctctctggagtaagaagtagctgctaaccccacttgagtaaaaaaagtaaagtctcagaacaagccctaggcttaggtgtaaccactctacatgtgaggaatgtgttcctgccttctgtacccttttccccattgacacctatgttttaagagataacagggcctggtttgctgattctaagcctgaggaatactggagcaggactttgagtctagttgcagctttatcacctatctcctctgacaagtggccaagctacttccccactgtaggtctcaatgtccttttagtaacatgagggatttggaataaatcagttgattttcaaacccttttaactgtaaaccctttctttaaagaaaaactgatattaaatcttaaagcataaagatgggcagttttggaatgagtgagtgggcagctaaatgaatgagtgtatattggggaagggagggaaagatggtggcttttttgaacagtgtgaaaaccttgggttgtgttaatttttaaaagtcccttgagattctgacatctggttaggcgcagtggctcatgcctataatcctagcactttagaaggccaaggtgagcggagcacttgagctcaggagttcaagaccagactaggcaacatgacaagaccctgtctctaccaaaaacacacacacaaaaaaaaaaacaaaaaaaaaaaacccagccaggtttggtgttgtgtgcctgtggtcccaactacttgggaggctgaggcacgagaatcacttgaacccagggggcagaggttgcagtgagctgagattgcaccactgcactccagcctgggctacagagtaagactcttatctcaaaaaaaaaaaaaaaaaaagattcttacattctaggagttgacagagcatgaatacctctggccttgaaggtggatcagaagaaattcatttcctagcataaagttcttataacatgcatctgaggaccattagggagatggtctacctactgggcacctttgaaagaaccgctttctctgaaaagcagaaacaagtattaggtgcttacattgaggggaaaaaaaatcttagaccaacatactttaaacaggcttgtgggtaagctaacaggaacaggttaaaaagtgaccacaagttgccagtaaaagctttttggttaagatgtgggctctggggaacagacagacttgctcctcaggggcagtgtatggtggtaggtggactgggttttcatgttctcacgtagaatacttagattacagtccaccattgtttaggtaaactaagtcaagagtagcccaaatcattgttcttcctggatgttccacagagggtgaagccagaggaggaagtgctggggtcagggagcaaaaacacttaagttgtgactgagacaaaggtcctaagtttgacaagtcagtagaattaagcaccccctggaagcagcaaatcctgtggtgaagaaacctgaactactcctatcctttaaaagtcacattctgatttctgtagacatattgatcaaactcagcagcagtagcatgcatttccccaggctgtggaagcttgctgtgtgactgacttctctgggccttgtttgtgcagttgtgtccgtgatggcagcagatactcttgggaaacgttggggaaaaaaggaatagcaaaaacaatagaaggtttccttaggctggggtcttgatgcagctcttaatccttacatttttggtagcttcttaaattaatattgaaaacaacagtaatgtattaaacccaggtactgtgctaaatgcttctatatgcatttttggttgaggttgtcagaatctttactgaacaagtggagaaaaagtctcagattaaccaattttcctagggtcacatagctagtaagtgcatagtcaggacttgtaccctgatggtgtgtctgactccagagcaactctcctgccctcaaagctctagttctccatacacaaaagtctagtgtttgcatgtttaagttcatacatcaggtggagacagattctgtgtttgtctttgctcatttctacctgctttgcctcagagagctcctcaacgctgacccagttccatgaatattcattacaaggtggcagggaactaacaagtattgaaggctcctaaattccaagcaccacaccaggttttttacaacaaacattgttaaataagttaatgttttgtaacttttttaaacagcctctggcacctagcaggtgctacaaaagtatggaatgaacaaagactaagactctttaacagcaacttataagggatctaatgacagattgctattattgatatcctggttctgtcacttaacagttgtgtgacttcagcaagtcatataatgtctatgagcttttttattttttaaatgaggataacacttgtacctacatcagtgagcagttttgaggattaaatgagacaagtgcttagaacaactcttggcatgtagtaagtgctcagtgtatgtttgctattgtcgatagtcttcaccaaatccctgtgagatagtaatttaaatatttcatagttttatagatatgcctcatatctcttaattggtaaaggtaggatttgaatctagacctctgagactcatcagtgctttttccattaaaccatcttcagcaggcagctttccataaaccttcctgcccttgccccatggcacacacacatacttggaaaaatatctcctctaactaggcatttataaccattcattcaaccttatggataaaaacatacctttgtttcttatttattgcagcactcatggttcactctctggtctaggactgatgggaataaaagaggaagaagaaagcgctggcccaggcctgtgttcgtgagtcggcctgccatgtttccatgtgccatttcttaccccttgtaggcaatggcaaagaatgtggtcaggctgtagcctccccaaccagcagacagctttatggaaacttggtatagcagctaaaagagtttagtttgtttatatggcatgtataagttttcaataaatgcctaaagttcaagcatagtatggggatgtccacagattgtttctttgtgtcattgagtttatgtgcataggtgcggtacaaggtgctcattccatgtagcacccctattacgtggtatatactgctaaggaaaccaagaggagtgattactcagaaaaccagccgattatgcaatttgtcaaagttgtaatgtctgtgaagcaaatttctttaaactgttttcttattgacaactcttaaaaaattgaaggacaatgatagctgaactgagaaatctggcaagtccaccaggcagtggagtggaagattcttttagtttttttaaccagccctggaaaccccttccattccacgtttaggaatcctccttcccttcagaacatgactgcagtgccacccttcaccagtaggtgcctccatcacaccatctctccctctaggaactggaaacttgaaattcagtaaaagccgttttaatcaactctcaaactgataacaatctgtgttggaaaggacatggggcataggcacccaattccaaaactactagaaatattaactgccctccagaaaagatgaatctggcatacagtatgtatcatacccaaaaacctcgtaaattgctctgtacactgagaccctgcaattctacagcattatcctaggatactaggatagctacacaaaaacatgtaatgaaggagctatcagagggttattacaatggagttctaggtagccagttctaatgtgtgtgtgagagagagtaaataaaatcttcggtgaaagagatcttcaagaagaggcagtagacctctggatccagaatgcttgactttgaatcccagctttttaaattattgtgtgaacttgaataaattgcttaacatttctgtgcttgggataataatggtatgtatccgagaggattacagattagtgagattatacattcacagtactgtatattatttgttgtatgaagtctggagggatacagaatagcatgtagtttgagtacacttttgtaggagaaaatatacaaagctatacataggcttctaacaaaacctgcaaggctatatgccaaaacgttaatagtatttatctatggctagtgccattgacaaatcaggttttaacaaatgcttttctgttgtagactcgattttttttaacattcaacatatattgcttttataattggaaaataattcttaccacctgctgtcaggagaagaaaagaagagaaagataattctacttaaaattaactcttagggttgggcagttggagcagtgtttaatcttataaatgtagcttcataagatctggtcctatatgaaagtttaaatgtagcttctgtaagatctggccctatgtggaaccagaactgaagagcttgacttgggatcagacaccgcaacttgattcaagtcccttcatcaggaggaaagttccctaggtgaattgccaacttccgctgcaaggccctgagaacaacttgaaactgacagtgttgttgggttccttcctgcccagctgagctccaaagctgtgagagcttagctgctgtttacctcttgaggctcaagtcctgagagataaattaagtgtctgcctcggatatgaagaggcctgggttggagcttcacctcccacacacacctgagtattttggggcaagtcacttaacctcatttgaggctatttccacagctgtataaaataaggaaataactattttgattattgagacatttgtggaaaataacacagtaatgcactatgtgtgaattaatttccctctctgggcctgtttcctcacctttaaaataggggaaattagtacttcataaggttatgaggattaaactaggaaaagtcaagattgagtgctgaataaatgacatactattttactagggatcatctccctgtaccaagagcactccacttgctctcaagaatagccaaggccatctttttcttaggaaaaagggtaggggtggaggtttccccagggatccaactccagaactctgcagagatgggcctgcactacaaggcctctgagacttcagtctgcacactctgttctttagcctgatgctccaccttttggaagccaaagctgccaacttggcctcttgcaaaacacacattccattcataagtgcgtttgtgcatttttcctcccacacccttctaggcagccagcgcagagctgccaaggcagctgctggagaagcagcttcttatgggggaaaagcaactccaagggcttttacagaactcatggtttaggctttgaacacattactcccattttctggtctccttgaccatagggggggttgttcatttctttttgcccccctttttgtaaataacctcttccctattaaaaggaaacctattaatgaaaatttgaaaaatacagaaaaatttaaatcacaactgatcccaccatcaacagtcaatgactgccaatattttataatcgatcaactttttccatgatgatagaaattctattattcaaaagcagagttttaatagctgtgtaatattctagcattgatgtatgccataatttctaaaacagtcccttttgttgaccttggaagttgttcccaaatgatgctgccagtgatatccttgcacatacatccttgggagatatttcttttaggaaaagtgcctaagtgaaattattgggttaaagagtacgaacacatgcttttaactccagaaaggattttactgtttactagcatagatttctttcaaatttttgccatttaaaatttttcattgtatatttaatgtctgcttatttgaataccctttagattggcatcctgctttttttcccagaagctttttggtaaattatttttcctaagtgagttgttcatatcctttgccatttttctattgggaagccagatccttttccatactgaatttttaagagcgccttatggattcactatatatagtgtccatttacaaactattacaaaattttagtttgctttttaaggtatatcattttatgtttagtcttttgtgatttcctctatttgcttttatgcttagaaagccctgactgatctctggatccaatgacaagtttatatatttctaatgatttaatgtctatacttcatagccttatttttcttggaatttatcttggcatgtaataactttctcccaaatatttagataattttacccaattatctagctttacttacccaataaaggaggatgctcctttatcatttaagtccatgtgtatactagggccagtattcatgttttcttctgtcttgtcatgtagtagtaccacactattgtgtagctctatgatgtactagcagttttagcagcatcaccccagataaacacagggcccatggagagtctccatcagcatggattacagaacactgtagagttaagatgcttcgctgctgactgcactggtgctgctacattccaccaggactttttcagcacccctgagtcaagagacgggacaagggtcagaacactgaacagaagaatgttaaactcaggtaggagccttatgtttttaagacagggcatcctcacaagtcaacgtaaaggaaaggaaatggagaggttaggcaagctccctaatcttatcaggcagactaaccctttttgacctacgtcaaaactcagagctagaaggatgacttccagagccaatccagccatgtgcttcagcaactgatttgaaaggagggaagaagccagtgttgcaactcttccgtactcctcagatcctcagcactaccttcagtgcacctttcttgctagaaagcattccacgtgcagttaagctcatctggtaactaagtgaagttgtttgtccatcatctaattgaaaattagattttagctgtatataatctatacagcctgtgacagcactttgaatagcccaggctctatacaagcccccaaatcagtatccttccactttattccccaaacctatttgtaaggctctggctgggctccataactcagaagtgccaaagcacagaagaaacaagcccaaaagagccaactggggaatgttttagaggcatactttttaagtgaggaaaacatcatcccttaagatttccttcctgcccccacctggtcctgtccttagtaatgaggaagagaaaaagagttgcagttcattgaggaaatctcagaaacctctccctaatcagagaatgtagacatgacttccagagcctttgcaacagaaaagaaaaagtacacctactcccaccaccatacttacttatttttacaagataccaacatgaggctgggaatctttggggaggccatcagggtctccatgaaagaaatgtgtaagatggccagtcaagagctttcctgaatgtaaacaataactagacagaaaatacaatggaaggaagctaagggtcgtaagtggtctaatcatcatacatctagagtgttaagaggcagatgggaatcccagggatcacgttagtctgagcttcttcccccatccccaatttggcacagagggaaattaagcccctaagaggggctgtgacttgtgaaaggtcatgtatgaccatgccaaccccctctcttattctctggtttccctgcattactcacctagcattcctttggagaaccttaaaagagcttgtaatgtttgagcacttatgtgtcattgggactttatcaagacttttaaatcctagcactctgatggaaccaagagtcttttaattttgcagatgagtaaaaggaaacttagaggttcactaacttgccgaaggtcacatagcagtggcatttgacagttaaagccagatacagcttgtttcctttgccttaatgcactgccatactgttaaatctaggggtcatgcatttaacatactgctcaacttcactttttattcctcatgagaattcacatcagttgcaaaggtaagactatttaggcagtggccctgtgaagacttatttgctctttgcctctaagcactgagacccccaaaagccaccctactaagcttggtatgtgggaggtcaacacccatgtttggagtctgaggatcctgtacttatctggattgtttttcaaagaataaaaattgttactcaatatcatgttggtagaagctcccagtgggtaaattttgccccagaataaagtcactgtttttttttttttgtagaaatatcaatattcaagtaaacaaatttattaaatccaacagcaggtaaccttccaaataaaaaacattaaaggaaaaaatgtagacatcaaagacaaaaatgtgtgtaacaagtcaataaaaatactcaaggggccatttggagagtgcaacagtgcagaaaatacaaacaaaagtattaacttttgtcaagtttgtacaacctcaacaaacagacacactggtcacaaaccaagagggatccacaaaggtggagggtcacatgagcagtggactcatcacctcagcggcttaaggcagggtatatctgtgggaccaattcatccaagccccatgtgcctattgcttcacattccccctttaaaacctagtcatattcattagtgcaacaggtaagagcaattaagcacagacggagctggggaccagggtcagagggaagacacttctcccagagcaaatgtatgcatgtcagggggatgaaaaaccccagcagctgctgaatggcttcctttggcaatatccaagatttgtgttgaaaggagcagggaggttggatgggtggcggaagtaggtatttatgagataggctgggtttccaagaagagaagaatagggaggacatgatgcccagcacctgaatcagaagcagaacccaatggttatgcaaagctatttgaactattttggcttctgcaaccagtgctcaagaatctatttcatctttcgaaaagggggaaaacccctgccgatcctcaccaacatgcagtcccagtccagtttaaactggatatgcaattacagcttaccaggggaataaactctgagggggatggatggttcggaaccttctttatatgatcagaaaacacactgtggaataagaggaggatcaatgtcgcatttcctcaatgagtcccaattaacacaattcaacaaccttaatagtcctttcagtcgtttaaacaagatactgctggagtcctccaagaagacctgtcatttaccaagatgttcaagtcccccaaggaagacctttgtcagttaccaagatgctcaagtcatagctaaccaaacatgagagacaagaaaaacagcagagcagtcaagtaaaatgcaacaaaaacctagcagcagctttcttctacgccttaaccttataattgcataactgagtctacaccttttgggctttgctgcactgaagacctcatttggaatctggcaaaccaaacattcttaaatacataggttggtgtaaaagtaattgtggtttttgccatacttaatggcaatacattaagtatggcaaaaacttacttttgcaccaacctaacagatctgttttggtttgtaaacttttagacaagttcttatcccagtaactccccaccactgtttaatacaatttggcacagtatatagtacatgaggccatcgagtgtaactactatgggactccattttggcaccagcccctagagaccagtactgcttcaaagactaatactgtgtggcttaatcctttctccctttccaaaaagactagtttgtgctttccttggggaagtttaatattgaaaacactgccttgtacattttcaattgttattttcctgggcccaggggtttggttaaaatttagatcttcacccagctctagattcatcttcccttatcagaagggcagacatggtttcctggacccaactcacacaggtgggcagcacttcagctgctgagacaaccagctgaagcatagcaaagccccttacaggaggtggggttaagaacgatacattgagatttggcaaagatgggggaaagagcaattcaatgaagcagcacgtcatctcataccatctttccaataaactgctaaagaaacatcacaaaagctgacaaagccagttgtcaaaactgagttatttcttatttcccaacacacttgtttgttgttgccctcagatgttgccgatttccaaagtggcgtccacatcctgcccctctccacatcaccctgatgttctgttgctaagcaaggagtgtactggcttatctgaggggcatgcattcagcctcttacacagacttactgctcactcattaagtggcaaacctatttctaggttgaaaggaacaagacttttcacttcccagaagtataacttcaaaccctacacacacctcaccttggatccctttgcagaaaaactgcatttcttgtggtcatgaaagagtcaagcattggcccagagctactgcagaagctt

SEQ ID NO: 883 - DNA, 4206 bp, Homo sapiens
  misc_feature (1667)..(1667): n is a, c, g, or t
gtcgactcgatctcggcccactgcaacctccacctcctgggttcaagcaattctcctgcctcagcctcctgagtagcttggactacaggcacgtaccaccatgcccagctaattttgtatttttagtagagaaggggtttctccatgttggtcaagctggtctcaaactcctgacctcaggtgattcacccacctcagcctcccaaagtgctgggattacaggcatgagccattgcgaccggccatgaaacaatctttacatgaagcatccttatacaaattctgcatgctatcccattccgccttttattttcttcaagtgatgaaaaggaaggatgctcagagagaccagcaaggacatggcaggactgcaagttgcatccagggtccaaaccctcatccctgattccaaattccatcaccacccaccacccagcactgcctgtccagcccatcagttacgctactaattcacagcatcctttgaatcagtggaaagaaaaccctaaaaagttaccaaagaactaaacaaagttatcaattaatttataattaaccgagataatccttgtaaaaataactttcagcggagggtggatggccttaaatttccccacaaaaggtaaaactttcccagacatccctttctgaaaatgagatgtcagtggatgagaaaagcctgctcccaagagtaggtgtgaggtattgcacctaggcccactgctgggataagctggcacagatacacgggacatgatgctttcattctcaccttaaagaaagagacagagaagaaaaggaaggggagcaagtggagaaggaatacaagaaagaggaagagaagcaggaagattctacatacaggctggctgtgtttcccctggggcatgctcctgtttactggtcccatgccaggttgactcattgcctcgttcatgggtggaattaagatgcctacctggggaataaatagagcaaggctgggtgctcacctccacagcggcttccttgatccttgccacccgcgactgaacaccgacagcagcagcctcaccatgaagttgctgatggtcctcatgctggcggccctctcccagcactgctacgcaggtgagttctgtgcagggagggctgcctcggggttaggggttgtcacttgggcctctatggaagaactcctgctccccaattctcagcagagatcagccccagtacaaaggctgtaggtttaacagatctcaccatgttgcccaggctggtcttgaactcctgagctcaggcagtctgtccacctcggcctccaaagtgctgggattataggtgtgagccaccacactgcctagatactgaaatcttctgtgatgctctgaatggtaatagtgaagcatcgtatgattttgaaccaaagaagaccaaataatcttcacgatatacttccaagtccgagtgtttcatttctcaagtcttgtcattaaatgaagtttcatgaggtttagcttttctgggctggggagtggagagaaagaagttgcagggcttacaggaaatcccagagcctgaggttttctcccagatttgagaactctagattatgcatcattatctttgagtctatattctcttgggctgtaagaagatgaggaatgtaataggtctgcccaagcctntcatgccttctgtaggaagcttgtttccttgtgcatccttcccaggctctggctgccccttattggagaatgtgatttccaagacaatcaatccacaagtgtctaagactgaatacaaagaacttcttcaagagttcatagacgacaatgccactacaaatgccatagatgaattgaaggaatgttttcttaaccaaacggatgaaactctgagcaatgttgaggtgtttatggtaatttcattttcttcctataagctttttaaatcccctgaccagggacaagtgggctcttcatttctcactgacaatgccaaagccactagtgaacaagccttttcttacattggttaatttagttgaatggttagtctaatgacgtttgccatcaagaaaaacatccagtgtccctgtgttgtcactctacccagagaatcctcagtggatgataaatgaatagggcaagagaggaaaaggaaaggtcggtagaagtcttacctatccccagagctctctaattcatgctcacaaacacagacacaatcacacaaacacagaaacacacatacacacatccagacacatgcaaacacacagacacagtcacaatcacacaaacacacacacattagacatacacaaacatagacagacaggcaaagacacagacacagacacagacacaatcacaccagcacacaatcatccagacacaaacacaaacacacagacagaaccacacaaccacagaaacacagagacacacacaaacacactcagacacacacatacaaacatatgttcactctctacagaaaaaacaattttccagaagacccgcacctatagaccaatctgcagagaaaacttctcttcttcaaaaaaaagtaaaagtgttctttcttaaaaaatgccctatttttcaacagtttggaaaataccatttgagcaagattctatacatctcaaataaaaagaatttaaaatgcacttccaggcaatcataatttgctagcataaatgatgagaaaccttggactatccaataggcaactgtagatcatgggtatgaaaccaccatggaggaagaattgcctcaaacaaaaaccaatagttttgtatttctttctaactatacatgtatattgttgagggttttctttagcatttattccctatgttaaattcttctttaatcgttccctggtaaaaaaaaaaaaaaaaaaaaagttagaaatataccaaacccctccattaggatgaaagtgaacatcacctcaggaaaccctgacgctttctacaacatggatgaaccttgaggatattatagcgagtgaagagtgaagcaaagagtcacaaaaacacaaatgctgcatgacccatgcatatgggaatctggggagccagactcagagacagtgaaaaaaaaaaaaacagtggttgtcagggcttgggtgcagagaagaagggggagtcatatttaatgggtctggagtttcagttgtgcaaaacagtaatattctggagttaggttgcacaaccacacgaatatacagaacactccgaactgtccccttaaaatggcaaattttatgagatgtacattttaccactattaataatttgttaaaaactaattatcaactgcagggaagggtgatggatttgtttcttttaaaacttcctcagacagatcatagtctgcagctccaataattagtagagcacaatggtggtggcagagggcgtcggactgctgggatgctgggaatatttccacaatggagggttagacgagagctcaaagtttcacttttttttttttttttttttttgcatttgagctaagattttaacaatcctgtgaaaataggtaatatagtcacgtatttgttgaatacattatttcaaagaaccacaaacacacagaaaaaatatttaaaaagtccatggtgggggaaatgatccagaaacaacagctcttctacttccagccctaaccgtctgggatgctagatggttgtgggcaaaccgtggaaaaagataagcttctgtttttcaagattttattttgttagagagtgcagaaaatctaagtgatgtctctgtttttgctttctagcaattaatatatgacagcagtctttgtgatttattttaactttctgcaagacctttggctcacagaactgcagggtatggtgagaaaccaactacggattgctgcaaaccacaccttctctttcttatgtctttttactacaaactacaagacaattgttgaaacctgctatacatgtttattttaataaattgatggcaaaaactgaagtttctctttgttctaccgtagaaaagaggcgttagagggcctcacatattttacatacacacacacacacacacttacttattaaagaactcatggtcatgggttgaggactctgtgaagcatttgtttcctcagtctgacctctaagccttggtactctctctgaagagtgtttccctgtccccatcccaccacctcccccgtcgac

SEQ ID NO: 884 - DNA, 10034 bp, Homo sapiens
ggatcccagcctgcccctccacttctctcccaagccaggtcccggcatgggtgggttatgctcatgctggcaatacttgaaacgggtttattaatgctgggtattttgcacaattttatagacctcttttctacatagtcttttttaaatggaaggagaaaatgtcagccacattactgtctgtgtagtgccaggtgaagggttatcagaaggctggttggttttaataagtttattccaagagaccttctggctggaatgagtgagagtgtgtgtgcatgtgtgtgtgtgttcatgtgtgccctgtatgaatgtggctggctcccagatcccctgggctgccccctgccccatcccctttgagtatcagaagcactctgagccaaggggacagggggcacgtgcactggtcacgagaaaaccctgggctcccactggggctcagcccagcctcctatctttccttcttctatggacttcagacagccagtgtctggggactctgccactctacccccagccctacccaccagcccccaggtgaggcttccagctgggacctgcccagacaggctgagcctgggcgtggtgggtggggtgatggctctggggagcggctgccatcctacaagccacaccccctcctctgagctctgaatatgggacccagtgccaggagctggaagacaaggtgtttctgccaaacgggacctccatccagagaaaaggaagaaggtgcagggtgggccaagaggcaagtgaaggttggcctgagtctgggccggaaactcagaggatgtttctcctctgctgggagctgtagtttcttatcaaaatagatattgttccaccatccccctccttggcccttcaagtgggctgaagccttggaaagtgacataggaagtccccagatcttgcccttctcactccagaggctagtggtcacagacagctgggaatggcagccacagagggtccctctggagaaacagcttcaccccagcctcagggccctgggcatcactgcagtggccctgggaggtgaggaagaagctggctagaggagggggctcccacctaccttttatttaagccagtattctttgttcctgcttgtaataaaacttcagtttataagagttgctttgctttggtttggtttttgtttgcttttcctttgctgaggccccaactgggagccctctgttctttcagacaaatttggttctttcctggggagactgtgagaaggcaggcagcccagtgatctggctacattttccctcacctggctggagctctgtccgctggaggaagagcagagagggctgcggctgagcccccatgggcacgtgaaaagaggccatcctgtcccctctttgtcccctccaccttcccctgcctcaggggcttggagaccccaaattcttcttccctactgcctttccactccgatccccaatgagtgcccagctaagaaaatgtttgagacagtagattccagtttgagagccggagcttccctggctaccacctccaacctgggcaccagggcccagccagacaactcataacactggcccacctctctggtatctccctcaggaggacacctgtcaggattttgccatctcctgcacagcctgaggggagctaacaggcctctttgcagagggttagctggtaagaccgtttcttccctgtcggccagcactgcccgctcccctccacacaccatctcatcctcatcgcatgcctcgccaaccccatggagcccgtccatctgtctggtgtgtggtgcggtgtgtgtgctggtggtggtagggtctccagggactccccgctaagcagaaggatcgggatatagggcaaggctaaaagcccagccccattgtggactgaggaagtacgttcgcgcagagcagctctccagctggaagaggaggtggagggtgaggctggggagaggatggcgaacctgccctgaggtgcttgggtctgtgctggtggggtcctggtatgcaggggccaccggtcactaacactcttatgtcctggctttctgtccccgctgagctttctctcacccgcccgttttctctcctgcttcattgcctgctgcctaagccttggcccttctctcgggcagaggcaggtgctgtggcagcacctctccccaccaccgggcccctgcaggccgcctccctcctcccaggcctgctaaccctctctcttctccttctttgctgtcctgccggggatctccagtgtgtgcgggggcttaaggacctcctgaggaccgctgctctctgcctctccaggaatggcctggggggagccaggcacccggcacctccacctgcctaacctgtggcccatctgccaccatctgtgcctacagggtctgccccccagcctgcccggcctgtgtgctctctaggaccccatagggggcaggggctggcctctttgccccattcccgctccatgccggccagagtgtagaaagccataacgcacgcagccatcagcacaataatgtgactctacgctgatatgctccctctctcctccactgacttccccttcccggatttgtgaggtgtcaagactaggaatctggccttagagcctgcccctccaccccctcagatcaggcatagccatagtcaagcccagcaggtttcctcaggagctgtctggggtgttgatggtggatgacgctgctgaacaagtttggtgactgttctaagcacaactggcttgatactgttcccacggcctgtccacctcccacccccaaccctccaccagagtaggtaggatgtagggagggtgcgtgccgcctttgctctaggcactgagggaccaagctagccgtgcacagccccatacacttcaggggcgtaaaggaaagagctgagccaaggaaaatcagctgagcccagggctgggggctgcttgtctgctatcctgtaccttttttttttttaaccaaaataaagattcccctcttcttgccataccattggctgtctggtggcgcctttactttggggcccagggatgggacctgcagtgggcgtgtggaacatatggctccccctcgctcccagctttcttccagctggccagtgctgctctggagatttacaagcacaacgaagccaggagggacacaggaaaagtggctgacatccttttcactctgcccctccagaactcttggtctcaattccagacaccacccagccttagctgacctctggattctgataggtcccagtgcaggctgagacagagggtttaactccagtttgggactgccatacccatgaactgagcccagcccagggtaacgatctcatggaaacttctctctccccagttgctgcactacatcaagatacacacatgtgcatacactgtactatgggctaaaaaaatacgtaccgctaccgttcagcaagggcttgccgagtcccgggcccattttctcatcttaacctgtgaggaggatgatgtcagcctttttacagatgagggaactgagactcaaggaagaaacaggagctgcccaaggtcacccagctggcaaagcagcaaatcccagatcggaacctgatctctgccccgagctctgagccatctgcactacccaaggaatgaatacagcggtgggaggatgagatcttggagaaaccctaaaattagagaatgtcatagccagtagagggcttagagttgatctgggccagcctccttgttttactgatggagaaattgaagcccagaggcaggaagggacctgcccaaggccttataacagagctgggatgcagtcccacactctgacctcattccattctctctccataaattctgcactgtctctagactggactggtttagatgtgggatactctaaacagcagtgccttcaagagaaaaagaatcagaactacgaatcacttaaaagtaatgtaagctactctgggcacactgcctatggggtcgccctgctccacaaggagccacaaaaataattaaaataatttaatatcccttcccaaaggtaaccagtaaagtaagctcttggctaggtaactggactcttgttcacaactagccagtgggaaaaggtgctagagcttcctctggccacctgtttaatttgatcattccaagacagaaacatttcttaggaagttctttctagaatctacctggtgtccctcccactgctatcagagccctgtcctctgtcctcagtggaggtagagagcaaatggttgctgctttcttcatcacaacccttcaaagcctattattaccagctaagaaggattggttgactatgggccagagcccctgagcctgctggtagaatggatgctgtacaggagggtggggaggtagcaggcagaatgaggaaagcccctttgagctgcaaccccagctcctgtcctgctgactcagacagctgactgtggagctccatgccctgccagggcctgctgcctcctgcccgtctgagctcctgaacttgggaaatggaggcccagaggcaaagggaggtacctgagacaggaactgagtcaggatcaacaggccagagcgggcaggaggtatcaggcagcctggctcccagatgcacccctgagctccagcaggggaggagtaggaatgaaggggcttccttgcccttgctcatggctatgcggagggcgtgaaccaccaccaggtcctctggcttaagtggcgggaagcaaatggtccctccctggactcaggctccaaagttcctgggcctgccttccaggttcccagtgtcctgggatctccagctttccccaggacttggggaagccccggctggatgactagtacaaatgaaggcccctgaggttccaggacctgctgaggtcacaggaatatcctagatcaagcttgtccaacccacggcccacaggctgcatgtggcccagaatggctttgaatgcagcccaacacaaattagtaaactttcttaaaacattatgagatttttttgcaaattttttttttttttttagctcatcagttattggtagtgttggtatattttatgtgtggcccaagacaattcttccaatgtggcccagggaagccaaaagattggacacgcctgtcctagatggagaggaaggaggcagtgctgagcacatctggccattcatccatctggagagagaaggctatgggcaaactgcttcctctcccctgtagacacccagctgggaaggtctggcctttggtaagtcctggcttggggtccttcctcatttcacagaacctaactctatgttagtgctttgtgagtatatgttgatcataataaagttgacgggattttttcacatgataataatagttgtcatctggccgggcatggtggcttatgcctataatttcagcactttggaaggctgaggcaggtggatcacttgaggtcagctgttcgagaccagcctggccaacatggtgaaaccacatctctacttaaaaaaaaaaaaaatacaaaaattagctgggtgtggtggtgcacccttgtaatcccagctactcgggaggctgaggcaggagaatcacttgaacccaggaggtggaggttgcagtgagctgagattgtgccactacactccagcctgggtgacaagagcgaaactccgtctcaaaaaaaaagaaaataataataataatagttgccatccattctactgtgctttccattaactcgtgtaatcctcacaagtcccattttatagttacaggaactgaggctcacagagcttaaatcacttggccaaggccacaaacagctataagaattacatttaggcagtctgattccaaagatactagtctattctgtatctcatagacaaacaatacatattcacttttttgttgttgttttgttttgagacggagtcttgctctgtcacccaggctggagtgcagtggcgccatctcggctcactgcaacgtccgcctcccgggttcaagcgattctcctgcctcagcctcccgagtagctgggactacaggcatgtgccaccatgcccggctaattttttgtatttttagtagagacagggttttcctgggttagccagaatggtctcgatctcctgaccttgtgatccacccacctcagcctcccaaagtgctgagatgacaggcgtgagccaccgcgtccgacctatattcactatttataaattggagagaataagaaaatcaaaagggccaggtgtagtgactcacacctgtaatcccagcactttgggaagccaaggcaggaggattgcttgaacccagaagttcgagaccagcctgggcaacatggtgagaccctgtctctacaaaaaatacaaaaattagctgggcgttgtggtgagcaccttattcttaggaagctgaggcaggaggatcacctgaggccaaggaggttgagactgcagtgagctgtgatcataccactgtacttcagcctggacatcagagtaagaccctatctctaaaaaggaaattgagaagaaagaaaatcaaagggaagcaaaatcactcactctcactacctcaagataccctctagaagttggtattttagtgtggttcctattgttttctgtgtcagttctctgatttgagcaaaatctttgggacgtcaaacttaaaatcccctttacttccttggaaaccctgtagcattagcccagacatgtccctactcctccttgtggcaaagagaaggatctcgtctttggtccccagagttctggcctaagcctccctccaggagggaagatgagtgttcagacactcagagtagctgggggagacacaggcctgtgaaattatcctggctcaactattaggtcggcagaatcccagtgaagggagccctacctctgagccccatctaagctttggctatgggtggggcagataagcaggaatccatccctataggctcaatgccaacacccttaggtgaaactcttgatgaaacttgaggccagggctccggcaagcagggaaagaacgttggcaacagaggtctccatctctgaggactctgccaggggtcagagatggggcaatggtcaaaaggaaggaacaggccaggcacagtggctcatgcccataatcccagcactttgggaggctgaggcaggaggatcgcttgagcccaggagtttgagacctgcctgggcaatgtagtgagatctgctctctatttaaaaaaaaaaaaaaggaaagaacaagtaaacttctgagaaacaggctgggggaggcatcacgtagctggaattgctgccccataaaacagaatggtatgtgtcactgccacctccctttctcagtcctctctctccccaggttgctagcgtccccctgggggatcaaactggactgcttcccagcctcagacagagagcagtctgagtcaggcaggaaagtgggacagccggggagctggaccccaccctctgtgagccccgctggtacctgatggcatgtggcttggagagggcaggtgacctggcgtggagggccagagggtaaatcctcaaacaagtggcaacaggccaccaacttgaaagggaaaattgtgtagtgatgggaaatgtgtccaacaaacctactgggtgactaattacaaaggctgggctggagcttcagaggctgcttgttaaacacttcattaagcggcactctgaaagctgccacctgcgcattctgggagctcagaggggaccctgagggggaatgaggcctggaggatggaaccatcttcaggtagactgagaaggagcctggatctcacttccaaacacagtctggagctcataggtcagaggcctcaatgggagaaaagctaaaggaagagggtgcagaaaggagtttcagggaattggtggctatgtgactttgagcaaatctcacccctctctgagacttagtgttcccatctctatggtcctgtgtgtgtcacagagacatggtggggattaaattcgatcgtgatatgaaagtgcttgggaaactccatggccctacctaaacatgagttatcctcacctgaaccaaggggggaagttacctggcaggattaggaaccccatcctcctgaacctttatgggctctgtcgaggctgaagcagccaggggctaaagccagtccttagcccctggaagggcactgtgaaagtggatctgatttgagaagccgtttcctgatgtgggcagccatgtgatgccagccccgaacaagagggggcagcctggagcctggaaaggtgccagtgcaggtggggcccacgcccagatttctcctgctgactgttctgatgattcacccccacatcccagcctttttacctttactgcagagccggaaagggtgtggggaagagaggagagggaggcaggtcttgggccctggtcccgccccctgctcctccccacccttctctgggcctggccacccagccaaaaggcaggccaagagcaggagagacacagagtccggcattggtcccaggcagcagttagcccgccgcccgcctgtgtgtccccagagccatggagagagccagtctgatccagaaggccaagctggcagagcaggccgaacgctatgaggacatggcagccttcatgaaaggcgccgtggagaagggcgaggagctctcctgcgaagagcgaaacctgctctcagtagcctataagaacgtggtgggcggccagagggctgcctggagggtgctgtccagtattgagcagaaaagcaacgaggagggctcggaggagaaggggcccgaggtgcgtgagtaccgggagaaggtggagactgagctccagggcgtgtgcgacaccgtgctgggcctgctggacagccacctcatcaaggaggccggggacgccgagagccgggtcttctacctgaagatgaagggtgactactaccgctacctggccgaggtggccaccggtgacgacaagaagcgcatcattgactcagcccggtcagcctaccaggaggccatggacatcagcaagaaggagatgccgcccaccaaccccatccgcctgggcctggccctgaacttttccgtcttccactacgagatcgccaacagccccgaggaggccatctctctggccaagaccactttcgacgaggccatggctgatctgcacaccctcagcgaggactcctacaaagacagcaccctcatcatgcagctgctgcgagacaacctgacactgtggacggccgacaacgccggggaagaggggggcgaggctccccaggagccccagagctgagtgttgcccgccaccgccccgccctgccccctccagtcccccaccctgccgagaggactagtatggggtgggaggccccacccttctcccctaggcgctgttcttgctccaaagggctccgtggagagggactggcagagctgaggccacctggggctggggatcccactcttcttgcagctgttgagcgcacctaaccactggtcatgcccccacccctgctctccgcacccgcttcctcccgaccccaggaccaggctacttctcccctcctcttgcctccctcctgcccctgctgcctctgatcgtaggaattgaggagtgtcccgccttgtggctgagaactggacagtggcaggggctggagatgggtgtgtgtgtgtgtgtgtgtgtgtgtgtgtgcgcgcgcgccagtgcaagaccgagactgagggaaagcatgtctgctgggtgtgaccatgtttcctctcaataaagttcccctgtgacactcctcctgtctctcttccagttcttggcgatgggctgggagtgggactggaatctgacttagagaccctgactttggacctctgagttagggccctgaactccctaggtggctcagtggcccgcacgcaagactttgagtccaggtgaggccggggtcc

SEQ ID NO: 885 - DNA, 4210 bp, Homo sapiens
tccttggccttgcatggcctgtttatttttaaaagtgcaaacttgcaaccccaaacaagctggggccctgaggccgtcaacccctccagtctcccctgtgacccgcagtctgcgtcctgttcccagtttcattcctcaagtgcatatatttttatttttttattttttttttgagacagagtctcgctctgtggcccaggttggagcgcagtcgcgcgatcccggctcactgcaagctctgcctcctgggttcacgccattctcctgcctcagcctcccgagtagctgggactacaggcgcctgccactgcgcccagctaattttttttatttttagtagagacggggtttcaccgtggtctcgatctcctgacctcgtgatccgcccgccttggccccccaaagtgctgggattacaggcgtgagccaccgcgcccggcctcagtgcatatatttttaatatcttgtagttaccctgctgtatactgtcatcttagggaccttttaaacaataccagtatgagcgggacctaccctgctgctcagtgaccccaggcagtgtgtcctaaggtggtgtgtcctgaggcgtgcgacactctgtcctgtcccaggcactgtggtgggggcatccggtgtccaggtgcagaggcaaaagctgctcccgggtttcccagaaatggttccgaggcctgggtcccagagagccagtgcaggttggggggtggacctctggctctgtgggggggtctgttctgctccagtgggccgtgtctgccttgtcatcatccagacagccacagctggctcctgggtcccctcgtcaagcagcatttcccagtaacagtgacttcgtggaacacttaggaagcccttaaaaaccatcctcggacctctgaggcagggactccagggggcacagcacctgtggtggggacaggcaggcaggctggatgcggggagggcccgggaggaggagtgaggagccacgcacggaactgctcagactctcccagcaaaggtcctggcccttgtgcatgcctttagttacatgtctgccttagaggcaaagacgagccgtcacgggggacccaccgggtcaggggtctgcggacacgcttgcaggaggaacccaaggaaagggggtgggggtggagccccacagattgcgtcgtgggtgggcgtggagcttgcacagcaggcctgctgctgcctcccagggcgctggttcacagcacggtcccagcagggagaggctgagccggttggactagaccacccaaggtctcaggttgcagctccctggtgaggagaggacaaggtgacttctgggtggggtggggcatgaagatggaagtctgacctcgggttccaacttgactcaaacgagctgagctcctggagtttagaaagggacaccagcttcagacatcgtgggggctggcatggtttgctctcgtgggctggatgggagcctccctagcccctcctgatttcaggctgcagcctatgggtcactccaggcacaggtggggtgagtcaagatctcactggaggagtcactgagcaagagggccggtgggaggcaagggggcatccagggacaaggggccagctctgcccccacttccccaccccacccactctaatactgcagcccctgtgcttccaactgccccctccagcctggggcccagcccctcaccgccagagactgcccgcctcctcttgggcaagctcctggtgggctccactgaagccaaagtgggcccttgggggcaggagagccagagcaaggcacgctccacctagatttagaccgggagagacctggaggatgccaaccccagaggtcctggggcgagctcagtgctggggaccggaggtgccgtctgctgccagaatcatggtgtgcgtggtccctgcccagcacgggtcagccagagcgagccagggcagaaatgacggccaggtcgatgttcctgtcgggggctgcttgtcccaggaggtaatctgagtcctggccgagcccaaaaaagccactgccctttagagccagctgtgagggtgcaggaggcagtgcagagggagtgggacccacagctgctagcctccctccaaaccctcctgcctccaccagacaccaggtcagggggccacaagtgtgggtgccgggcagctgcccctcagctgagctgccgggccacccagctcgtgtccctcccctgccaggctgcagctgggatggtcacccgggcagcctgagtcagcctgctttctctctcaggtgaggcggaaccaaccctcctggccatgggaggggccgtggtggacgagggccccacaggcgtcaaggcccctgacggcggctggggctgggccgtgctcttcggctgtttcgtcatcactggcttctcctacgccttccccaaggccgtcagtgtcttcttcaaggagctcatacaggagtttgggatcggctacagcgacacagcctggatctcctccatcctgctggccatgctctacgggacaggtccgctctgcagtgtgtgcgtgaaccgctttggctgccggcccgtcatgcttgtggggggtctctttgcgtcgctgggcatggtggctgcgtccttttgccggagcatcatccaggtctacctcaccactggggtcatcacggggttgggtttggcactcaacttccagccctcgctcatcatgctgaaccgctacttcagcaagcggcgccccatggccaacgggctggcggcagcaggtagccctgtcttcctgtgtgccctgagcccgctggggcagctgctgcaggaccgctacggctggcggggcggcttcctcatcctgggcggcctgctgctcaactgctgcgtgtgtgccgcactcatgaggcccctggtggtcacggcccagccgggctcggggccgccgcgaccctcccggcgcctgctagacctgagcgtcttccgggaccgcggctttgtgctttacgccgtggccgcctcggtcatggtgctggggctcttcgtcccgcccgtgttcgtggtgagctacgccaaggacctgggcgtgcccgacaccaaggccgccttcctgctcaccatcctgggcttcattgacatcttcgcgcggccggccgcgggcttcgtggcggggcttgggaaggtgcggccctactccgtctacctcttcagcttctccatgttcttcaacggcctcgcggacctggcgggctctacggcgggcgactacggcggcctcgtggtcttctgcatcttctttggcatctcctacggcatggtgggggccctgcagttcgaggtgctcatggccatcgtgggcacccacaagttctccagtgccattggcctggtgctgctgatggaggcggtggccgtgctcgtcgggcccccttcgggaggcaaactcctggatgcgacccacgtctacatgtacgtgttcatcctggcgggggccgaggtgctcacctcctccctgattttgctgctgggcaacttcttctgcattaggaagaagcccaaagagccacagcctgaggtggcggccgcggaggaggagaagctccacaagcctcctgcagactcgggggtggacttgcgggaggtggagcatttcctgaaggctgagcctgagaaaaacggggaggtggttcacaccccggaaacaagtgtctgagtggctgggcggggccggcaggcacagggaggaggtacagaagccggcaacgcttgctatttattttacaaactggactggctcaggcagggccacggctgggctccagctgccggcccagcggatcgtcgcccgatcagtgttttgagggggaaggtggcggggtgggaaccgtgtcattccagagtggatctgcggtgaagccaagccgcaaggttacaaggcatcctcaccaggggccccgcctgctgctcccaggtggcctgcggccactgctatgctcaaggacctggaaacccatgcttcgagacaacgtgactttaatgggagggtgggtgggccgcagacaggctggcagggcaggtgctgcgtggggccctctccagcccgtcctaccctgggctcacatggggcctgtgcccacccctcttgagtgtcttggggacagctctttccacccctggaagatggaaataaacctgcgtgtgggtggagtgttagg

SEQ ID NO: 886 - DNA, 2266 bp, Homo sapiens
ggtgtccccggcgccgcccggggccctgagggctggctagggtccaggccgggggggacgggacagacgaaccagccccgtgtaggaagcgcgacaatgccccgctacggagcgtcactccgccagagctgccccaggtccggccgggagcagggacaagacgggaccgccggagcccccggactcctttggatgggcctggcgctggcgctggcgctggcgctggcgctggctctgtctgactctcgggttctctgggctccggcagaggctcaccctctttctccccaaggccatcctgccaggttacatcgcatagtgccccggctccgagatgtctttgggtgggggaacctcacctgcccaatctgcaaaggtctattcaccgccatcaacctcgggctgaagaaggaacccaatgtggctcgcgtgggctccgtggccatcaagctgtgcaatctgctgaagatagcaccacctgccgtgtgccaatccattgtccacctctttgaggatgacatggtggaggtgtggagacgctcagtgctgagcccatctgaggcctgtggcctgctcctgggctccacctgtgggcactgggacattttctcatcttggaacatctctttgcctactgtgccgaagccgccccccaaaccccctagccccccagccccaggtgcccctgtcagccgcatcctcttcctcactgacctgcactgggatcatgactacctggagggcacggaccctgactgtgcagacccactgtgctgccgccggggttctggcctgccgcccgcatcccggccaggtgccggatactggggcgaatacagcaagtgtgacctgcccctgaggaccctggagagcctgttgagtgggctgggcccagccggcccttttgatatggtgtactggacaggagacatccccgcacatgatgtctggcaccagactcgtcaggaccaactgcgggccctgaccaccgtcacagcacttgtgaggaagttcctggggccagtgccagtgtaccctgctgtgggtaaccatgaaagcacacctgtcaatagcttccctccccccttcattgagggcaaccactcctcccgctggctctatgaagcgatggccaaggcttgggagccctggctgcctgccgaagccctgcgcaccctcaggtgcatataattggccacattcccccagggcactgtctgaagagctggagctggaattattaccgaattgtagccaggtatgagaacaccctggctgctcagttctttggccacactcatgtggatgaatttgaggtcttctatgatgaagagactctgagccggccgctggctgtagccttcctggcacccagtgcaactacctacatcggccttaatcctggttaccgtgtgtaccaaatagatggaaactactccgggagctctcacgtggtcctggaccatgagacctacatcctgaatctgacccaggcaaacataccgggagccataccgcactggcagcttctctacagggctcgagaaacctatgggctgcccaacacactgcctaccgcctggcacaacctggtatatcgcatgcggggcgacatgcaacttttccagaccttctggtttctctaccataagggccacccaccctcggagccctgtggcacgccctgccgtctggctactctttgtgcccagctctctgcccgtgctgacagccctgctctgtgccgccacctgatgccagatgggagcctcccagaggcccagagcctgtggccaaggccactgttttgctagggccccagggcccacatttgggaaagttcttgatgtaggaaagggtgaaaaagcccaaatgctgctgtggttcaaccaggcaagatcatccggtgaaagaaccagtccctgggccccaaggatgccggggaaacaggaccttctcctttcctggagctggtttagctggatatgggagggggtttggctgcctgtgcccaggagctagactgccttgaggctgctgtcctttcacagccatggagtagaggcctaagttgacactgccctgggcagacaagacaggagctgtcgccccaggcctgtgctgcccagccaggaaccctgtactgctgctgcgacctgatgctgccagtctgttaaaataaagataagagacttggactccaaaaaaaaaaaaaaaaaaaaaaaaaaaaaaaaaaaaaaaaaaaaaaaaaaaaaaaaaaaaaaaa

SEQ ID NO: 887 - DNA, 5725 bp, Homo sapiens
ggcagcggcggaagcggcgagggcggcgggcgtccggctctgaggtggtggaggcggcggaggcggcggcggctcgggactgggctcggctggaagcagcgagggtcagagcgccgcagcaagcgccgatctcccggctcgaccatccgcctgccgcccggacgcctgggccgcggagtttgtgtcccggctcggaccccggcgcccagcccggagccgtaaccttgaggcggcggcggcggggccgggccgggccgggctggggggcggtggcgctggatccgcggctgcccgatcgttggcgggagatgtcgaaccccgggacacgcaggaacggctccagcatcaagatccgtctgacagtgttatgtgccaagaaccttgcaaagaaagacttcttcaggctccctgacccttttgcaaagattgtcgtggatgggtctgggcagtgccactcaaccgacactgtgaaaaacacattggacccaaagtggaaccagcactatgatctatatgttgggaaaacggattcgataaccattagcgtgtggaaccataagaaaattcacaagaaacagggagctggcttcctgggctgtgtgcggctgctctccaatgccatcagcagattaaaagataccggataccagcgtttggatctatgcaaactaaacccctcagatactgatgcagttcgtggccagatagtggtcagtttacagacacgagacagaataggaaccggcggctcggtggtggactgcagaggactgttagaaaatgaaggaacggtgtatgaagactccgggcctgggaggccgctcagctgcttcatggaggaaccagccccttacacagatagcaccggtgctgctgctggaggagggaattgcaggttcgtggagtccccaagtcaagatcaaagacttcaggcacagcggcttcgaaaccctgatgtgcgaggttcactacagacgccccagaaccgaccacacggccaccagtccccggaactgcccgaaggctacgaacaaagaacaacagtccagggccaagtttactttttgcatacacagactggagttagcacgtggcacgaccccaggataccaagtccctcggggaccattcctgggggagatgcagcttttctatacgaattccttctacaaggccatacatctgagcccagagaccttaacagtgtgaactgtgatgaacttggaccactgccgccaggctgggaagtcagaagtacagtttctgggaggatatattttgtagatcataataaccgaacaacccagtttacagacccaaggttacaccacatcatgaatcaccagtgccaactcaaggagcccagccagccgctgccactgcccagtgagggctctctggaggacgaggagcttcctgcccagagatacgaaagagatctagtccagaagctgaaagtcctcagacacgaactgtcgcttcagcagccccaagctggtcattgccgcatcgaagtgtccagagaagaaatctttgaggagtcttaccgccagataatgaagatgcgaccgaaagacttgaaaaaacggctgatggtgaaattccgtggggaagaaggtttggattacggtggtgtggccagggagtggctttacttgctgtgccatgaaatgctgaatccttattacgggctcttccagtattctacggacaatatttacatgttgcaaataaatccggattcttcaatcaaccccgaccacttgtcttatttccactttgtggggcggatcatggggctggctgtgttccatggacactacatcaacgggggcttcacagtgcccttctacaagcagctgctggggaagcccatccagctctcagatctggaatctgtggacccagagctgcataagagcttggtgtggatcctagagaacgacatcacgcctgtactggaccacaccttctgcgtggaacacaacgccttcgggcggatcctgcagcatgaactgaaacccaatggcagaaatgtgccagtcacagaggagaataagaaagaatacgtccggttgtatgtaaactggaggtttatgagaggaatcgaagcccagttcttagctctgcagaaggggttcaatgagctcatccctcaacatctgctgaagccttttgaccagaaggaactggagctgatcataggcggcctggataaaatagacttgaacgactggaagtcgaacacgcggctgaagcactgtgtggccgacagcaacatcgtgcggtggttctggcaagcggtggagacgttcgatgaagaaaggagggccaggctcctgcagtttgtgactgggtccacgcgagtcccgctccaaggcttcaaggctttgcaaggttctacaggcgcggcagggccccggctgttcaccatccacctgatagacgcgaacacagacaaccttccgaaggcccatacctgctttaaccggatcgacattccaccatatgagtcctatgagaagctctacgagaagctgctgacagccgtggaggagacctgcgggtttgctgtggagtgaaaagcaaccaaaggcaacagagtctagctcatggccaccagaccaaaagcatccagcttctgtgcacctcctgcaaagctggcagaggccctggaattccagatcacctgaggggaaagggttgtctctctcctttctgttgggggagggggatgggggacttttgttggtggctcccacccatatatccctcctttaccatagtactcccacccacttccatcacccatccaataaaatgcagccaggtttagcctttggctttggtcacacaggatattctgctgtgttgcaacccatgtggtgataaggctcacagccctgagctctttacgggagcatcaactcacagttaggggactgggcgtggctgattgagggtttggaactggtggctatgccagctattccatctcaaaacagccttgaggccccttttcaatttgagcagctgctagatatcttatcagagctcagattccagatttcacatcccagcagccggttctgggtagcagatcaatttccaactggaaaataactatataatgtatgcttattggaattctgccacagcaggaagcttgagtcaaaatgtgtttcccctttgaaaggagaaggaattggagcagcttttcctggaggcccaggatatttcttttctgggtatcttggctgaaaattttgttttacatagagaaaaacgatcttttaagggtcccttttgctgcattatctgtccagtttgacttttttttcagtgaaaacaccatgtcatggagtgtaggaaagagcagaccaaaatcagccctagagccaaccagtcagtcccaaagctgtgacctctgtgccactgttgtccatagaagagcatcgactgtgtcacttaaaatattagtaaaccatgatgcagcaactgctaagagctaaactaacaaaattgtgtcatcatagctgctggcttggtgtgaactcgcttaaaagcaatggtgaaaggataacctcgatgatgtaaatccacccaaagatactgttctacaaaaagtagggtgtggacgcaaacctgtgacagcagagggggacgacttcacactcactgcctcatgtggcccctttcccagtggcagctggtgacactaacgattgctactcggttcacttgcccagatgtcttcatatgatgagcaaggccagaagcaaggctagattcgaagtttctgacaccatttccagtttgcacaaaagtcagtattttatcttaaagtggcttgatttccaatagctgaacttgggcagaaaacagcaggccaatgttcctatgtggtttctttgttgttgtttttgtttggggtgggggcaagtacagggtaattcatgagcaagacatttcactgctgtcgaagtctctgggatcccgctgtgggtctgagatggcctgggaaggaccttgtggacaatggttttatctgttctttttgtcactgttaatttctgggctgctgaggttctagaatagaagggctgccaaatgaggtttgctgcaggaggaaagtttaatcccccattccaaaagtccaggccaaatggtgggcttagcctctttgaaaagttctgccttgcccccacaggtgggcacatcctgtgtctcattcaccatgatgcttcctgagggtgttctagaagcccgttccccagtggctgtatccagcctttccttgcatcatcttcctcttgaaggtgaggaagtgaaaactacagacctcccccggacagcccactctctatcacgagcctaacccgcgggaggcggaagagacatccattcgagaactgaagcggcctccgggatgaggtcagaggccccacctgattttcctggtggtggtatccaaaatcttcagtaactaggaaggaaaccagggtctcatggtttaaaagactttgaagcaggaatgttgcatttgacgcctttaaaactacctttttgctgttgggaggagtcgggggcgagccttagcagctgcaccgccatccccatgctggttggtgctgccctgcctctcgtgccgggtgttgcttcagcccagagccagagggctgggtcccgggtcctccacaggtgaccccggtggacacacgcgttcccatcctggcctccgtctctgcttttccacttctacctgcgtgtgggtttgccgccttgtcatcggttgtgtgagtgtcgcagacctttccagagctccggttcactctttccaaacaggcctccctgtcggtggcactgcactcctagaaccttcagtttctacgatggtttgtttggtccttttgaaccaccccaaagaactcaacatggcaaagcaaatggtaaaagcttcccgactgttctactttgggtccgcgcgaagcccactcacgtgtgatctgtgttgcccctctcggtggtcccaggcgatccagccatgccccctgcccctctgcccagatgcttcaggggcccggcttttcaggcttgccctcaccagcggccgtcagccgacactcagggatgtagctaacaccactccgccagtgctttcagtaggaagagctgaggctgcctgggaggcccggggcgaccggaaaagggctctctcaagttctgaaaagagaatctgccaccagatcgaatttcgacccctgagcttgttcggacgtatggtccaaattcagattaaggtggtcacccaacccgagatgtcaggaaaggccttctgcagagaaaatgtccccccacccgccatctgcagccaggtgtgtgccacacggcagccttcccgaaacatagtatggattttaaaaatgtgtttatttttgtttctcaaccactttataacgtattttttaatttattttgtaatgtcttgttttgaagtattgctgctatccttgttatccttcccactgtttttatcactgatttattttgtgaaagttgtacactaatgttctatgtcaaaatcaaaagtatttaatgaaatactagttctatttaatgtggttatggaaccagctggaaacacaaaacaaacagtgattgtacagcaggctgggcccaggaggtcaggttcattttgttacatatgcaataaactcacgacttt

SEQ ID NO: 888 - DNA, 3128 bp, Homo sapiens
gcggcctcggggaccatggggagcgatcgggcccgcaagggcggagggggcccgaaggacttcggcgcgggactcaagtacaactcccggcacgagaaagtgaatggcttggaggaaggcgtggagttcctgccagtcaacaacgtcaagaaggtggaaaagcatggcccggggcgctgggtggtgctggcagccgtgctgatcggcctcctcttggtcttgctggggatcggcttcctggtgtggcatttgcagtaccgggacgtgcgtgtccagaaggtcttcaatggctacatgaggatcacaaatgagaattttgtggatgcctacgagaactccaactccactgagtttgtaagcctggccagcaaggtgaaggacgcgctgaagctgctgtacagcggagtcccattcctgggcccctaccacaaggagtcggctgtgacggccttcagcgagggcagcgtcatcgcctactactggtctgagttcagcatcccgcagcacctggtggaggaggccgagcgcgtcatggccgaggagcgcgtagtcatgctgcccccgcgggcgcgctccctgaagtcctttgtggtcacctcagtggtggctttccccacggactccaaaacagtacagaggacccaggacaacagctgcagctttggcctgcacgcccgcggtgtggagctgatgcgcttcaccacgcccggcttccctgacagcccctaccccgctcatgcccgctgccagtgggccctgcggggggacgccgactcagtgctgagcctcaccttccgcagctttgaccttgcgtcctgcgacgagcgcggcagcgacctggtgacggtgtacaacaccctgagccccatggagccccacgccctggtgcagttgtgtggcacctaccctccctcctacaacctgaccttccactcctcccagaacgtcctgctcatcacactgataaccaacactgagcggcggcatcccggctttgaggccaccttcttccagctgcctaggatgagcagctgtggaggccgcttacgtaaagcccaggggacattcaacagcccctactacccaggccactacccacccaacattgactgcacatggaacattgaggtgcccaacaaccagcatgtgaaggtgcgcttcaaattcttctacctgctggagcccggcgtgcctgcgggcacctgccccaaggactacgtggagatcaacggggagaaatactgcggagagaggtcccagttcgtcgtcaccagcaacagcaacaagatcacagttcgcttccactcagatcagtcctacaccgacaccggcttcttagctgaatacctctcctacgactccagtgacccatgcccggggcagttcacgtgccgcacggggcggtgtatccggaaggagctgcgctgtgatggctgggccgactgcaccgaccacagcgatgagctcaactgcagttgcgacgccggccaccagttcacgtgcaagaacaagttctgcaagcccctcttctgggtctgcgacagtgtgaacgactgcggagacaacagcgacgagcaggggtgcagttgtccggcccagaccttcaggtgttccaatgggaagtgcctctcgaaaagccagcagtgcaatgggaaggacgactgtggggacgggtccgacgaggcctcctgccccaaggtgaacgtcgtcacttgtaccaaacacacctaccgctgcctcaatgggctctgcttgagcaagggcaaccctgagtgtgacgggaaggaggactgtagcgacggctcagatgagaaggactgcgactgtgggctgcggtcattcacgagacaggctcgtgttgttgggggcacggatgcggatgagggcgagtggccctggcaggtaagcctgcatgctctgggccagggccacatctgcggtgcttccctcatctctcccaactggctggtctctgccgcacactgctacatcgatgacagaggattcaggtactcagaccccacgcagtggacggtcttcctgggcttgcacgaccagagccagcgcagcgcccctggggtgcaggagcgcaggctcaagcgcatcatctcccaccccttcttcaatgacttcaccttcgactatgacatcgcgctgctggagctggagaaaccggcagagtacagctccatggtgcggcccatctgcctgccggacgcctcccatgtcttccctgccggcaaggccatctgggtcacgggctggggacacacccagtatggaggcactggcgcgctgatcctgcaaaagggtgagatccgcgtcatcaaccagaccacctgcgagaacctcctgccgcagcagatcacgccgcgcatgatgtgcgtgggcttcctcagcggcggcgtggactcctgccagggtgattccgggggacccctgtccagcgtggaggcggatgggcggatcttccaggccggtgtggtgagctggggagacggctgcgctcagaggaacaagccaggcgtgtacacaaggctccctctgtttcgggactggatcaaagagaacactggggtataggggccggggccacccaaatgtgtacacctgcggggccacccatcgtccaccccagtgtgcacgcctgcaggctggagactggaccgctgactgcaccagcgcccccagaacatacactgtgaactcaatctccagggctccaaatctgcctagaaaacctctcgcttcctcagcctccaaagtggagctgggaggtagaaggggaggacactggtggttctactgacccaactgggggcaaaggtttgaagacacagcctcccccgccagccccaagctgggccgaggcgcgtttgtgcatatctgcctcccctgtctctaaggagcagcgggaacggagcttcggggcctcctcagtgaaggtggtggggctgccggatctgggctgtggggcccttgggccacgctcttgaggaagcccaggctcggaggaccctggaaaacagacgggtctgagactgaaattgttttaccagctcccagggtggacttcagtgtgtgtatttgtgtaaatgagtaaaacattttatttctttttaaaaaaa

SEQ ID NO: 889 - DNA, 1429 bp, Homo sapiens
cttatttcatctgtgcctgcaaggaactgcccggcaagttcctactgggataccagccccggggtaaacccaggatagaatatgtaacggtgactccagagggattccggtaccggggccagatcttcccaaccgtgaatggactgtttagatggtttaaggatcactaccaggatcctgtaccaggcatcacccctagcagcagcagcaggacccggacacctgcctctatcaatgctaccccagccaacatcaaccttgcagatctgacacgggctgtgaatgccctgcctcagaacatgacttcacagatgttcagtgccattgctgcggtgacaggccaaggacagaaccctaatgccaccccagcccagtgggcctccagccagtacggctatggcggcagtggaggcggcagcagtgcttaccacgtattcccaacgccagcccagcagccagtggccacaccactaatgacccctagctactcctacacgaccccaagccagcccatcaccacccctcagtaccaccagctccaggccagcaccaccccacagtcggcccaggcccagccccagccctcttccagctcccggcaacggcagcagcagccaaagtccaacagccatgcagccatcgactggggaaaaatggcggagcagtggctgcaggaaaaggaggcagaacggcggaaacagaagcagcggctgacacctcggccctcccccagccccatgatcgaaagcacccccatgtccattgctggcgatgccaccccactcctggacgagatggatcggtagggggcctgctcctcggactctggttacctctgaggctgggaaaggcctggctgcccactgcctccctccctgcccctccttttatgtccataaagtggcgtgaagtgagacgttctctttggtggtcaacccggatgggtgacaggctggatggccttgtgaacttgagctcagtgtatgctaggcaacaattctcccgctccagaccctcaccgaccacctgtcctgggaccaggctgggaggggagtgtggcagggaggaggaagaggaaggtgagaatgagtagaacagttttgtattctactccctacaagccattttgaacttctgccctcaccggactctgggctgtgactggggcaccaaactcagcacatgagtctcccctagctctcgtggggagagggatgctatttattcagtttggggcaggagggagaggagggaaagtatttctgaccctgatgccaacagccgggtggctgtccaagcaggattgcaggggacacagggaagcactgcccagcccctgcctggctgccctttcccccctgctgctgccaccgcttcctgcctgtcatttgaataaacagtgtttctattgaaaaaaaaaaaaaaaaaa

SEQ ID NO: 890 - DNA, 1415 bp, Homo sapiens
tcaataagaaaaaactctattttccagagtccctggttgaatgttcaattagatcaactaattgtcctttcacatctggttgctcataaaagcaaaacctaccattcgagtgttcaattctagtgtgaagtgttttaccatgggagcaaaagcttgagcttgaaagataacagtcattatggctatctgggacaagaaaaaaaccatctagcacatttgctcacttttcttctgcctgtcagtgtatgattgcccccagcaccattattattttgcaggttttttcagctcctctgtaaggcttgtcacaaccatagtgtcactactttggacagaatcatcaactcttgcaaccccaggaggacagtcaggattagaattcaaatgacagtgggtactttcagacacacacatagacaactgcacctgtgagtccacagaagttcctttagattctgtattggaggtagtaatgatgaaagtgtcttcaggaatgtcttcatggcttgctcttgggctctgcattgtaactccttacaggtaccaatgaacaagccattcagagatggatccacaaagatctctggagcaacgaccaggtcctgctctacccgattctcagctttggggatagaattcccagaaacatctgtgtccggagttggttccttccagtgggttcttggtcttgctgacttcaagaatgaagccgtggaccttcgcgcttcaggctgaagatagtgaaaatccgtgccagacttggattggaagaatgaaccaaggctttgagtctcttcgtctcatctccgttttgatacgtgtctccttagtttgtaagccaaggagaggactacagtgaggattgtggagggaagtggaccttattggtctttgagctctcacatctttaaagactgttggtgctgagagaaaaagtatcctcatctggcagaactcccatagggtgtgctccccttgctgttctgcttttgttttgcagaaagctgcctttttcaatgtactcattaggctttcattgttttttccttttttacctttttcatctttcactgttgatatcacaggtggccatatctttaccagtgcagctaccaaataagaaatcatcttttccacattcactagttagtgatggttgttgtactaccatgaaatcagtttcttctttacttttattcaggttacaagatttctggaaggttttaagatcaattttaattagtctttgtgactggttacttcatccaggggaccaatttctctctggaatattagtcccgcacccctggagagcctgtgcggctgcatctccctccggaggtggttctggagttggttccttttggtgggttcctggtctcgctgacttcaagaatgaagccacggaccttcac

SEQ ID NO: 891 - DNA, 2738 bp, Homo sapiens
atcgtttactttggttgtcccttctggcatggtgcatatgttatgggaagagggattataatttggtgctgtttgtagagatgacaacactgataaaatccactcattgctggtcccagcacacctggaaagttctgcaaggcctcagctacagaaagcccagagacagaaagtaaactctttcatgacccttgatcatcagatcatcaatccaactcttaaatggtcacaacctgcagtgccaagtggtgggcctcttgtgcagcatgcacacacaactctggacagtgatgctggcctcacagaaaacccactcaccaagttactagctattgggaaagaagatgacaatgcacaatggcatttatctggaagtattttggatgtgtatagcggtgaacaaggaatttcaccaattaacatggggcttacaagtgcttcttgtccaagtagtctaccaatgaaaagagaaattacagaaactgacactagagctttagcaaaagagagacaaaaaaaggacaaccacaacctcattgaaagaagaagaaggtataatattaattaccgaatcaaggagcttggcactcttattccaaagtctaatgatcctgatatgcgctggaacaaaggaaccattctaaaagcatcagtggagtacatcaagtggctacaaaaagaacaacagagagcccgagaattggaacacagacagaagaaattagagcaggctaacaggcgacttctacttcggattcaggtttttataagaatgtagccatgagtcacatagcttacacatgactcagctgtcatcagttttcttcattggtctcatttattttttctcttattaacaattatttttccttttgaaggataattttactgctttttagaagttcgtgaattgggttgtttcaattaggatttgactagaaatccaggatcaagatggctgaatatgtatatatgtatatatgtatatacacatatatgtgtatatatgtgtgtatgtgtgcatgtatatatatatacacatatataatgacaacaaattacaaaatgcataaaatataactcatttcataaatgcacacattattatcctaatcaaataataatactaagtaaaacatttgtttctctacattatattggacattaaattctcccctccttctttcatttctttccaacattgctatggatttcattgcctcaaggcatgttgtgacagtgtatattaagtcacttctcatctgttcatataatccaaaatatcaaaatatgggcttttataactctcaagattttttaaaaatgtgagtatgcttagcaccaggtaaaacatttactgtttccatgaaaaggtcctgcatttacagtgagaaattaatcaggaagaataaatagatgactttctgctatctccaaatggctatattgtagtctgagccactatggaaccatcatcagtcataacctttgtagaacaatgagaccaaacttaaaaaaaagtctgagtaattttctcagagttatttttcatgcatcagaaatgtatcaatttcattatttgcaaagattattcataatttgtattgtattactcttcattttaaatgcttgttaatattttgattctatgtctggcttattctctagtgttaaatccaatttcaaagacattatttaatgattttcgtttgaaattacaggaactagaaattcaggctcgtactcatggtctgccaaccctggcttcacttggcacggttgatttaggtgctcatgtcaccaaacagcagagccatcctgagcagaattcagtagactattgccaacaactgactgtgtctcaggggccaagccctgagctctgtgatcaagctatagccttttctgatcctttgtcatacttcacagatttatcatttagtgctgcattgaaagaggaacaaagattggatggcatgctattggatgacacaatctctccatttggaacagatcctctgctatctgccacttcccctgcagtttccaaagaaagcagtaggagaagtagctttagctcagatgatggtgatgaattataagaaataaacagacccaattcatcaactggaaagcaattctatgctggtgctatgcaattatgctctgtgtttcatatgttgctttggcttattttttttcttaaaggaatgtgttgttcatgaaaaactgatagaagcaacagaagaattcgcaggaagaaaaatcatagtgttaatgaattattgagggcgaaaaaaaggtgttttcttctttgactacggagtccaaatccacttaaattctgttttcctgaaaagaggtacagcataagaaatagctctttattgatgttttaaaagcagcaacttggtggtgtactactggaactaatgactgcaaagtgttaaacgactgaaatatacaaacagtctcttagttactcatttccatcttctcttcaactttcacatcagtcttccggaatcaagatcaacatatcaggtggtcattgcctttctccattgtctagtagacatgtctaaagttcaaactttataggataaataaatgtataatagattatctgtcacttgtggttgaaaggcaaatctacaataaatgtgagaattttccacaataaaatatggataacttataaaaaaaaaaaaaaaaaaaaaaaaaaaaaaaaaaaaaaa

SEQ ID NO: 892 - DNA, 2764 bp, Homo sapiens
gggcaggttgggaaacagcccagtggtataaggatgaggaaactgaagcccagagaggtgaagtgaggtgcccaaggccacacagcaagttagaggcacagctagtacggtagctcaagtctcctgactcccagtccagtgctcctcctattactccacgagtcctgtctctaagcttcctgacaaatgctagaacggaagaaacccaagacagctgaaaaccagaaggcatctgaggagaatgagattactcagccgggtggatccagcgccaagccgggccttccctgcctgaactttgaagctgttttgtctccagacccagccctcatccactcaacacattcactgacaaactctcacgctcacaccgggtcatctgattgtgacatcagttgcaaggggatgaccgagcgcattcacagcatcaaccttcacaacttcagcaattccgtgctcgagaccctcaacgagcagcgcaaccgtggccacttctgtgacgtaacggtgcgcatccacgggagcatgctgcgcgcgcaccgctgcgtgctggcagccggcagccccttcttccaggacaaactgctgcttggctacagcgacatcgagatcccgtcggtggtgtcagtgcagtcagtgcaaaagctcattgacttcatgtacagcggcgtgctacgggtctcgcagtcggaagctctgcagatcctcacggccgccagcatcctgcagatcaaaacagtcatcgacgagtgcacgcgcatcgtgtcacagaacgtgggcgatgtgttcccggggatccaggactcgggccaggacacgccgcggggcactcccgagtcaggcacgtcaggccagggcagcgacacggagtcgggctacctgcagagccacccacagcacagcgtggacaggatctactcggcactctacgcgtgctccatgcagaatggcagcggcgagcgctctttttacagcggcgcaatggtcagccaccacgagactgcgctcggcctgccccgcgaccaccacatggaagaccccagctggatcacacgcatccatgagcgctcgcagcagatggagcgctacctgtccaccacccccgagaccacgcactgccgcaagcagccccggcctgtgcgcatccagaccctagtgggcaacatccacatcaagcaggagatggaggacgatttcgactactacgggcagcaaagggtgcagatcctggaacgcaacgaatccgaggagtgcacggaagacacagaccaggccgagggcaccgagagtgagcccaaaggtgaaagcttcgactcgggcgtcagctcctccataggcaccgagcctgactcggtggagcagcagtttgggcctggggcggcgcgggacagccaggctgaacccacccaacccgagcaggctgcagaagcccccgctgagggtggtccgcagacaaaccagctagaaacaggtgcttcctctccggagagaagcaatgaagtggagatggacagcactgttatcactgtcagcaacagctccgacaagagcgtcctacaacagccttcggtcaacacgttcatcgggcagccattgccaagtacccagctctacttacgccagacagaaaccctcaccagcaacctgaggatgcctctgaccttgaccagcaacacgcaggtcattggcacagctggcaacacctacctgccagccctcttcactacccagcccgtgggcagtggccccaagcctttcctcttcagcctgccacagcccctggcaggccagcagacccagtttgtgacagtgtcccagcccggtctgtcgacctttactgcacagctgccagcgccacagcccctggcctcatccgcaggccacagcacagccagtgggcaaggcgaaaaaaagccttatgagtgcactctctgcaacaagactttcaccgccaaacagaactacgtcaagcacatgttcgtacacacaggtgagaagccccaccaatgcagcatctgttggcgctccttctccttaaaggattaccttatcaagcacatggtgacacacacaggagtgagggcataccagtgtagtatctgcaacaagcgcttcacccagaagagctccctcaacgtgcacatgcgcctccaccggggagagaagtcctacgagtgctacatctgcaaaaagaagttctctcacaagaccctcctggagcgacacgtggccctgcacagtgccagcaatgggaccccccctgcaggcacacccccaggtgcccgcgctggccccccaggcgtggtggcctgcacggaggggaccacttacgtctgctccgtctgcccagcaaagtttgaccaaatcgagcagttcaacgaccacatgaggatgcatgtgtctgacggataagtagtatctttctctctttcttatgaacaaaacaaaacaacaacaaaaaacaaacaaacaaaaaagctatggcactagaatttaagaaatgttttggtttcatttttactttctgtttttgtttttgtttcgtttcattttgtactacatgaagaactgttttttgcctgctggtacattacatttccggaggcttgggtgaataatagttttcccagtctccctcggatggtggccttaaggcctggtagtgcttcaagaggtccactggttggatctctagctactggcctctaaatacaacccttctttacaaaaaaatcttttaaaaaaaagtaaaaaaaaaaaaaaa

SEQ ID NO: 893 - DNA, 1925 bp, Homo sapiens
atgcgaggctcagaaaggtgcggggcatgtcaacaacctcgcaccctgcaaggtccgcgcgcggagcagcaaagccgtgtcccgcacccccgcgttcgcagactcgcacttgcgagttcttcccttctcccgcacgcgactgcgcccagggacgcaagcccaccaccgggacaggctcacaaagctccacgcagacccacaagtgagcgaacacacatctctgagcagatctgcgggggcagaggagcgcgcttcgctctttcctgcacccccagcctcctcgcctccccaccccgcccctcctccacctccccagcccccaagcccccgggcagccgcgcgccgggcggggcgagggcggggcggggtgtcgggcggcgccggcccaaaaggcggagtcgctaggcgaaggggccagatctgtgagcccagcgctgactgcgccgcggagaaagccagtgggaacccagacccataggagacccgcgtccccgctcggcctggccaggccccgcgctatggagttcctctgggcccctctcttgggtctgtgctgcagtctggccgctgctgatcgccacaccgtcttctggaacagttcaaatcccaagttccggaatgaggactacaccatacatgtgcagctgaatgactacgcggacatcatctgtccgcactatgaagatcactctgtggcagacgctgccatggagcagtacatactgtacctggtggagcatgaggagtaccagctgtgccagccccagtccaaggaccaagtccgctggcagtgcaaccggcccagtgccaagcatggcccggagaagctgtctgagaagttccagcgcttcacacctttcaccctgggcaaggagttcaaagaaggacacagctactactacatctccaaacccatccaccagcatgaagaccgctgcttgaggttgaaggtgactgtcagtggcaaaatcactcacagtcctcaggcccatgacaatccacaggagaagagacttgcagcagatgacccagaggtgcgggttctacatagcatcggtcacagtgctgccccacgcctcttcccacttgcctggactgtgctgctccttccacttctgctgctgcaaaccccgtgaaggtgtgtgccacacctggccttaaagagggacaggctgaagagagggacaggcactccaaacctgtcttggggccactttcagagcccccagccctgggaaccactcccaccacaggcataagctatcacctagcagcctcaaaacgggtcaatattaaggttttcaaccggaaggaggccaaccagcccgacagtgccatccccaccttcacctcggagggatggagaaagaagtggagacagtcctttcccaccattcctgcctttaagccaaagaaacaagctgtgcaggcatggtcccttaaggcacagtgggagctgagctggaaggggccacgtggatgggcaaagcttgtcaaagatgccccctccaggagagagccaggatgcccagatgaactgactgaaggaaaagcaagaaacagtttcttgcttggaagccaggtacaggagaggcagcatgcttgggctgacccagcatctcccagcaagacctcatctgtggagctgccacagagaagtttgtagccaggtactgcattctctcccatcctggggcagcactccccagagctgtgccagcaggggggctgtgccaacctgttcttagagtgtagctgtaagggcagtgcccatgtgtacattctgcctagagtgtagcctaaagggcagggcccacgtgtatagtatctgtatataagttgctgtgtgtctgtcctgatttctacaactggagtttttttatacaatgttctttgtctcaaaataaagcaatgtgttttttcgg

SEQ ID NO: 894 - DNA, 46275 bp, Homo sapiens
ggagaacctgagctgctgcccaccgcaggccgggggtgggaacccctggagcccggccgcgcagtagccgcgatcctgccaccagggggcagcaagtggaagggaccctagagccctcacctgggagcggccgtagctgccttggtcaccattcccagaactgccctagatgggggagaggaggatcatacggggagcggcgcatgagagcagctcaggttattcggcttattgtgtccacgcacctcctcctgtctgacacttttcccgacccccgaggaagccagatgtggctccctctccagctcgactccaagacacgggatgggagaggccgtcagccaaggggttggacaggccattgaccaggaggctggagagactgccggctctggagtcagtgaggcccggggccctggggtggcagctgcggggtcacagcgccccttcctgccctcacacccatcgtgcaggggccccatgtgtgaatgtcgtctgcaccgtcgctctgtcagcgtccgtaggtctcccggatcacagtcctgcccccattctcctgggagcttcccagacaagtgtcatattctcccatgtccccctctttctccgccaccccacggtctcctgagacttgccaagtggacttgactgcaagagcttagacaggcgggataacgtccccaccatcacagagtggaaaatagggatacagagtcagaagcagtggggtggctctggcagaaacgatagtgcgcgcatcaggggcacagcatgggtggggaacaggaggctgagggagcctcagggtgacgactatcagcgaggccgcccatcctcgggcagcggcagctttcagagaaacttggagccctctcccggcagggaccactagggcctcaccccatctcagccttccacagaggtgccaaactcacccaggaggactcactgccgctgtcacctctgctgccaccactgttgccactgctgccaccactgctgccgccactgctgccgccactgctgctgccactgctgctgccaccactgctgctgccattgttgttgtcaccattgctgccactgccactgctgcccgactgtgagccgctgcctccctgaggggcaggaagggagcagggctgggattaaagacagagcaccaagacgggcccctcctccctccctctccacccaggccatattccatgatgcccagtctaaggggagcagaacttctccatttcctcctggtgcacaactcctgggttgcccctctccactcaccccagagttgctggagcctccacctgagccagatggtgggggattcgtgcactgtcgagggaaagggatggtgagtttggggacggtgagtttggagacgttggcctcggccatggacacaggccaggcctctcccattctttggggcttggcttcctttctcctaatgtgtttctcccacctccccttcccatctgcctcctccccaggcccaggcccgtctcttcctccttttttttttttttttttttttgagacagggtctcactctgttgctcaggctggagtgcagtgatgcgatctcggctcactgcaacctccatctcccaggttcaagtgattctcctgcctccgcctcccaagtggctgcaattacaggcgcatgccactatgaccggctgatttttgtatttttagtgaagacagggtttcaccatgttgaccaggctggtcttgaactcctgacctcaggtgatccacgtgccttggcctcccaaagtgctgggattacaggtgtgagccacctcgcccagccccatctcttcctctcaccccaatccctccactcccccatcttgctttcctctttgtctttccccagctctctgtagcctgcacccagtggcttcttcatttgttcccagccccttcctcttaccccttcattctggttgctggctctcactgaaccatagccaggctgggccacagctccctgcagagagggtgagactgagagtaggatccagagggaccagggaggcacgcggagcatgtgggcttggagggagggaggtggcaggtagcaggtctgggggtgactttacctgagtgttggtcccaaagtttggtggccctccattgcctccttgaccccagggagctccctgaggattcattccaaagctgcctgctgagtttccggggtatccgtggacccacggagtccccagacctccaggattgccctggccctggcctccaaggccaccttgagagccaaagatgccatggcctccagaagtttcctgcaagaacaacatacctgcacttagtgggaccatctctgaccctggtagagaagagccagggcaaatcataaagagaccaggagagagacaggcagagggactccagggtggcataggaggggggcagaacatagaaggaagctgccccagaagcctgcaagtaagagatccatccatcctttcaaccgtttcccaagaatctcagcccagcagcccacagcctcccatttccacatgcagccccacagccactcacccaagcaccattgtggccaggcaccccctgccaggagccgcggacagcatctgctccgtgtcgaatgacatcttctgcctgtctgccaatctcgtgcccagtgtttcccagagcatgggctgcttccccgaccctgttgcccaaagcatctgctacgccaaagcctggaacctgcctgactccagtgccaactgcttctctggtcccttggccaagggcctcactgactttagagccagctgcccctccggcctctttgccaatggcctttcccaccccttcgctcagggcgtctcccaggccatgtccaagggcctccccaatatttgtcccagtgctttcctctccgctctgcagggggccagcctccccactgcccaggcagagggccagcaggaggcaggccaggggcccctggaacttcatctctgcccagccccctctctctccagagtgtcttcctcccaccagggtctcctccttgccgcccttgctctgcgtctctgtgccctcctctgtcctcctccttccgactccctgtcctccctccctctgggtctgcagccttctctctcctgtcctcaactgcctgggcttctcagagtccacctccctgtcactactccttatactctaggttgggagaaggtgacagggctgggcaacctgaggtccctccccgcagtgactcagggcccagccaccaatagggtaatcagctgttattgtgagtctgagagtctctgtcgaaacagagagtgagccgcatcagggagggagggagaaatggatgaggtgatgcaaaagtgctcccatttcccaaccccaggcattcggggagctgggtgggggcaggggcatctaaggagacaggttgtcgttggctcctggaggcggtggggtgggggcagacttagaagagaggagttactggcaggaccccaccaaaggagtaaggacagggaagccccaggggacaggacccacccaggctcagccagcctggctcaggggctccagagtgacaggcattgcccgtcctcggcctggcctttctcggtttcagcacctcagcctctcctctccctctcccctcccgcattgccacctacaggtgactgccttcttgttcctccacaccttccagcccacagagagagactggcaaacacggggctgcgtgtcagtttctgagattctggggagagcccccggggggaccctcggtgtcggggaaggaggtggccatagccctttgagtggtcagcagggtgtctcagcgttcaggctgctcccggctgagaaagctgggcgcggagcagggcagccaggcgcgccagccacccccagggaacgagtgggagggaaggccaagggagggagccgctgacccaggcacccatcctgtttacgcagccctagaggggcacgtgtgagtataagcgcctatgaggggcgggactgggccagctcaccccacccatcccccaggccaggggccagggcagcaatggcaagcgagaagagggtagcgcaaggtcaggagccatccgtgagagccacggccctctccccagtcccagctcgggatacagaacctgggagcctccccccgcctcacccctgcccagcaagtgtggctgcttctctattcccaggggccacagggcctcccactgtttcgtatcactggggttcatcgcccagttaggaggggccagtttccatcagcctttctcaatgtctctcagtcagtctctctcttctctccaccccaatatccgcaccccagcttataacatccaacacttcttaccttgtaaacactatccccatctgtcctcctcagctcctacttccctgttattccatctctgactcgttaatgatgataatagcgatggtggtaataataataataataataataataattacagctccagcttatcagcggttctgtatgtacccagcattggactaagcacaagcagtttaagaattatacaactctgggagatggttctttttttctagagacagggtcttgcccaggctggagtacactggcacaattgtagctcactgcagcatcgacctcctgggctcaagcgatcctcctgtctcagtctcccaagtagctgggactatagatgcacaccagcacacccagctaattttttttttctttttgagacagagtcttactctgttgcccaggctgaagtgcaatggcacgatcttggctcactgcaacctccgcctcccaggttcaagtgattatcctgcctcagcctcccaagtagctgggattacaggcgcatgctgggcctgtaatcccacgctgggctaatttttgtgtttttagtagagacagggtttcaccatgttggccaggctggtcgtgaactcctgacctcgtgatctgcctgcctcggcctcccaaagtgctgggattacaggcgtgagccaccgcacctagcctccagctaattttttaatttttatttttgtggagatgagatcttgttgtgttgcccaggctgatctcaaacccctgggctcatacgatcctcctgccttagcctcccaaagtgctgggatgacaggcatgagcaaacagtggtattacattatgcttgctgcagctcctgcactctctttgttttttgtttgtttgtttgttttgtttcgagatggagtctccctctgttgcccaggctggagtgcaatggcgcaatctcggctcactgcaacctccacctccagagttcaagcaattctccttcctcagcctcccaaatagctgggattgcagatgcacaccaccatgcccagttaatttttgtatttttagtagagacggagtttgaccatgttggacaagctggtctcgaactcctgacctcaagtgatctgcctgccttggcctcccaaagcgctgggattacaggcatgagccaccacgcccggccatgtgccctttttgttaagaaggaagattagcaagtatgaaagaggtgttctgactcaccagcacagctggacatggggtctttctcaaaggtaggtccaggcctcaagaaaataacactaataataaattttttcaaaaactaaaatgaagtctttctctttaacatagtcagagagcttaaaagaaaattgagaagaaagtaagtttctccctgtgtgattcagttattcaaagccgtgtccatggatcacctcaattctcccatgccaccaacaggcctgtgttctacctgctaggaaaaaattgcccctcagacatcgctgggcctgaggagccacctcagatcagccctagggcatccttattaaataactagtgtgaaccaaataaaatattaggtgctttcacatacatgatctcattgaatcctcaatatgaccacaagaggttaatattattcccattatacagatgaggtaactgaggcccaagtggctcagcatcacacacaaaatcatatgtgaaaagactgtggtaaaatagagttgtcaaaacttgagccaggcactttgggaggctaaggcaggtggatcatctgaggtcaggagttcaagaccagtctggccaacatggtgaaaaccccctctctactaaaaatacaaaaattagccgaacgtggtgacaggcacctataatcccagctactcaggaggctgaagcaggaaaattgtttgaacctggaaagtggaggttgcagtgagccgagattgcaccattgcactccagcctggacaacagagcgaaactccgtctcaaaacaacaacaacaacaaaaaaaaacttgagccaggtcagtctgactccaaacagctttctctcctccatcaccatgccacccatgttcttatgcgtgatggcacccacaaatctgatatgcctatgtcatgtccaaggccctctggtctcagctcttctctctaattcacatcattcattcagcaaatatttatgactacctgctccgtgacacgcctattccagacactggggatacagcctagaaaccattctccagctgagtgacacctcataatcccagctcatgcctgcaagcccagcactttgggaggccgaggcaagtggatcacttgaggtcaaaagttcgagaccagcctgggcaacacagagagaccccaactataaaaaatgtttttgaaaaagtagttggatgtggtggtgcacacctgtagttctagctactccagaggctgaggtgagaggatcgcttgagctctggaggttgaggctgctatgaccacaccactgcactccagtctgggtgacagagtgagaccttgtctcaaaaaaagcattctccttgcagaacttacattcatggtgggggaagttaggcaataggtgacagagaggtgttttaaatagggtactcgggaaaggctctttgagatgtggcctgtgagctgacccctgcagggagtggaagagtgagccatggggattagctggggctagtggattccaagcagggggaacagccatgcaaaggcctggaggcaggagcctgcctactgtatttgagaaccattgtggctggagcagtgttgggatgggagaagctaaagtcaaagagggaaagatcctggggtcttgcggactattatgaagactggcttttttttttttttttttttttgagactgggtcttgctctgtcgctcaggctgaaggtcaatggcgcaatctcggctcaccacaacctccgcctccagcgtacaagtgattctcctgccttagcctcccgagtagctgggattataggcgcctgccaccacgcctggctaatttttgtatttttagtagaaacggggtttcaccatgttgtctaggctggtctggaactcctgacctcaagtgatccacccgcctaggcctcccaaagtgctgggattacaggcgtcagccaccacacctggccaactttgacttttatttttactctgaatgaggtagaaccagccaagggttctgggctgccacgggtgctaacagagttcccctagggaactgattgttgggggttgtggagtagagagaccagggaggagggagattggaggctggactcagtctagtgggaagatgaggctttgggggtgggtgatgtctctgctcccttctggggggtcccagatctcaaactggcacctacagtcttacctcttccacggtgcctatcccagagcctacattcaaaccctagctccaccgcttactaaccatgatcttaacccatctgtgcaacagttttctcatctgtaaagaggggtgaatgtgaggattaagtgaagtaatacatgtaaattgcttagagaagtgtctgccactcagaagcactcaatatatgttctcggcagtgctggtcacattgctgtggctggaatgctttcttggcagttgtttaatcttgtgacacacacatgcacacatcctgaaaatgccagatgcatggctcatgcctgtaatcccaaaaccgtgggaggccaaggagggaagattgcttgagcccaagagttcccgaccaagctgggcaacatcgtgagaccctgtctctacaaaaaatacaaaaattgccagggtgtagtgacgtgtgcccatagtcccagccacttgggaagctgaggcacacggatcacttgaatccaggaggctgaggttgcagtgagccatgattacgccactgcactccagcctggacaacagggtgagaccctgcctcaattaaaaaaaaaatgccagatgcagaaacttacttttaaagaacactcatttggagccaggagagggtagctctcacctgtaatcccagcactttgggaggccaaggcaggcagatcacctaaagtcaggagttcgagaccagcctggccaacatggtgaaacctcatggctactaaaaatacaaaaattagccaggcgtggtgtgcgcctgtaatcccagctacttaggaggctgaggcaggagaatctcctgaacccggggttcggaggttgcagtgagccaagatcgcaccactgcactccagcctgggcaacagaacaagactctgtcaaaaaaaaaaaaaaaaaaacccactcatttggatgtagccccctcccgcttcctgggggtcgcaagggcagcatgccacctcactgctagagatgttcagcagggaagtgcccttgaactggagcctggccatcaccactgactagcagggtggcctcaggcaacacgctccgttccgtgcacctcttcttcaacatctgtgagggcaatgatcatggtacttgcctcccggatggttgtggggatgaaatgaatcatgcctgtaagtgcttagcacagaccctgtaaaagatgcccggtgagagccacacccaaactcctctccctgttcttcaacatcctcagaaaccggcccttcctctctgtgtttctccctagcctggctccacccatctcaggcaaagcagcctgtgtcttgctcacactcgttccatggcccttcccaacctgctcaagtcagtggcttcccttctgctccttgccagacattcatgcctggccttgacatcactgcttgaacctctttgtctggggggaaatggatacgatatttgtaatatgattacagattgtcataaccaacaagaaaaacaagatcagcgctatgagagagagtgacagggtggccgtagctcaggttgagcggtcaaggtagctgagatgcaaagggtagggaagagccagtatgaggggccgaggggcatggagagtgttcctagtagagggaacagcacagaagacctccaggcaggagagagccaggcgtcttttaccctcaaaaccgactcaaagctctcctttttcagaagcttcccaggactgactcagtgcctatcaattatcttgtatctctttggtattttcaggacccccatccaagcaaacccagcaagaaaatgtgcctaaaaaatagtcagtcagccgggtgatggccaggcgcggtggctcacgcctgtaatcccaatactttgggaggccaaggcgggcgaatcaactgaagtcaggagttcaagaccagcctgaccaacatggtgaaaccccgtctctactgaaaatacaaaaattagctgggtgtggtggcgcgcacctgtaagggaggctgaggcaggagaattgcttgagcctgggaagcagaggttgcagtgagccgatatcaccccactgcaatccagcctggatgaaaaagcaagactctgtctcaatatatatatatacatacacatatatacatatatatacacgtatatatatacacacacatatatgtatatttttttaaataaaaataaagtcaatgaaagcttttacttcaagaaagaaagagtcccttgaatgttgccttttcgaaagccgccactataggattcttttaagtagggcctcccccaatacctgtgagatgatgtccagcacggagcagaccctcaatcagtatctgacatgaatggaaggttctatttatatcagtgcagcaagcagctgggtgctgtggctcacacctgtattcctagcactttgggagcctgaggcaggaggattgcttgagctcaggatttcaagaccagcctgggcaacattatgagaccctcgtctctacaaaaaaaaattacaaaattagccaggcatggtggtgtgtgcttgtagtcccagctacttgggaggctgaggtgggaggattgcttgagcccaggagattgaggctgcagttagccatgactgtgccactgcactccagcctgaacgatagaccaagactctgtctcaaaaaataaataagacaaaatgcagcaaatataatgtttacagtttactttgaaatacatcaaaaatgtttgatatggggctaaatggacagatgtgtgaccaagcaagtatggtaaaatctaagtggtgagaattctggtgttcactataaaattctttcatcttttcatgatgcttgaaatgttttcaaaataaaatatcgcagggggagggaaggagcatatgtaatgaaatgatggtattccacaaaataagggaaaatgcagtgactataaagtgaggaacgtcccattttttgcacaaatgcaggcccctccccttgccggtcattgagctcttattgatgcgtggctttgtgtgtttgcattcacattctgtttataggccttgcctcccaggaaggctgtgaattccccaagggcaagaacactgtctattattttcagtcccccattgatggaattttgtagctggaagcaacagttgtcgaatccctgcctccctttatacaggaggaaatcgtggcccctagaggggaagtaggcggccttcaggcatcttgctcccgattggaacgcaagtctcccagcacccaggctagtgcctgggagtgttacagagacttcaccgggaaccacgagaagtcaggtgctggcgacagacggagccagacccaggcctgctgctttctctgtgggcgcccttgtcccactgagccgcagcatcctcatccatacaacggtgacgataacagggcttctgcctttgggttgtgggagacttaaagagttaaagaacatgaacaggccagatgaagtggctcatgcctgtaatcccaccactttgggaggccgaggcaggagaatcccttgagcccaggagtttgagaacagcgtgggcaatatagtgaggccctgtctctaccaaaaaaagaaaaaaaaaatttttttttgagacagggtctcaccctgtcacccaggctggagtgcagaggtgcaatctcggctcactgtaacctccacttcccaggttcaagtgattctcctgcctcaacctcctgagcagctgggattacaggcacgcgccaccacacccagctaatttcttttttggtatttttagtagagacagggtttcaccatgttggtcaggctagtctcgaactcctgacctcatgatctgccagcctcggcctcccaaagtactgggattacaggcatgagccactgtgcccggccaaaaaaataatttttaattagccaagtgtggtggtgtgtgcctgtagttccagctactcaagaggctgaggtgggagaatcccttgagcccaggagtttgagaacagcctgggcaatatagtgagaccccatctcttaaaaaaaaaaaagaaagaaaaagaaaatttgatgagccaagtgtggtggcgcgtacctgtagtaattccagctactcaagaggctgaggtgggaggatttcttgagcccaggaggtcgaggcagcagtgagccatgatcgcatctctgcactctggcctgggcgaaagagcaagattctgtctcaaaaaaaaaaaaaaaaaaaaaaaaaaaaagaatatgaacaactctggacacggtaccttgagtctagcaagtgctctatgctcagtaattgtaatcattgttcctctgggctttgaatggtccacagatctgaaaatggggccttctgtgcccctactcaggtggctcctgtcaccagcatgtcttccacctgagccttccatccttctccctctttcccctgagaggatccccagccccatcccgtgtctcacttttcttattcaccaattctccttctctgctgacgccaaagggcaaagacctctgtttttccagaatatcctttgtagctcttcactgtttctctccttccacttactgactgtgtaaacttggtcatgtttcttaatgtgtgcaagcgcccacgtgcttctctataaaatggggcaataacagtccctttcacctaactggggggttgggaggagtcaatgatgtcatgcaggtaacgcacctggcaggcagcctggcaggtcttaactgcacaataaatacaagttattgttgttattattttggcgccccccacccccttgactgaggatgctacctcctgggcccagaccattctctcccggtgtgtctgtccccacgagtggcctgcagtggttttccctgcacgagtcctcctgccagtagccagcacgaactttgcaccccagcaaagcgtggtttgtccccattacccgccctcttacagctaatcagcctgaaatctccagctcaacccaccctatgcctcagacactccgactccttcagcaaagtaacaagaaaagacaaggccctcctgcctccctgtccatccctccttagggagcccaggggaccacaatgagacagcatagtgtatcaagtttattcacaaatcccagtacaacccccttcagggatttcagaaacctgtcccccacccccaacccctccaggtcatgtcagctgatgtgacaacggcgacattattctcccagcaaggccggatgccagtttagggcatgatgttggcgacgctctggaagagagaaggagagcaggggtgaatgtagggtccacagtcatgacgggacccgagacctcagccccgcccctcgggagaagcacaaggggactggctgctctggccccggagttatgttctggggaagtttcaggaaggtagcatctaaacttaagaacacaaggaagccagtccccacaggcagaggggctggggcctctgcaggaaccaacaagcctcgtgtgtttagcctgagaggatgctctgccgcccccatagcctgggatacacaagggtgggccttcctcctccgtgatacaccctcaccctggcctgcaccaggtctcgggcagcagatacaataagtgcaaaaagaggctgggtgcagtggcttacgcctgtaatcccagcactttgggaggctgaggaaggaggggatcacttgagatcaggagttcgagaccagcctggccaatatggtgaaacccctgtctctactaaaaatacaaaaattagctgggcatgttggcgcacacctgtaatcccagccactcaggagactgagataggagaatcacttgaacccagaagacggaggttgcagcgagctgagattgcaccactgcactccagcctgggagatagagtgagactccgtctcaataaattaaaataaagaaagagagtcaggagtttactttgagccccaactgggaaccaggattccataggagcctctgcactggggtgaccttgcaccagggagaggacaaagacacaggctccccctcccagcatgaagcaaaggcatttgcaggagggttgggacaggagggaagccagtcagcaaatgggaatcgaggaatgacaaggagagagagggaatgagaacagtcagcagcccctcctccctccctggctcccaggggcaccagggcctgggaggtcttttctgccagcttgtgtttgccttggtggaaatgaaaggcacccaaaagatgagggcagggtgcaaaggggagggagcaggtggagagagggaagcccaggactgggtatcaggttggagggtctttgcagaggctgcaggtctgcccgcccggggagctgtccaaacagacaccgggaaggggtcggggtgagcgtatctatcaggacgcagagcagaaaagagacaccatggggcactcaccctccacagggcgggaaggttgatgaaaggcgtgttgaccgaggcctgcaattcaaggacaagaaggtcagtctccagcgtctgacccacagccatgctagggaactcccaggggcctcctctcccctaccccagagtccgcgcttaccccagaggctaacggcgtggttgtggcccctccttgatggctggaagatccgctttgatggttgccctgtggacaaagcccagactcttgttacaaccccacaaacgcggagggtctcccagttccttttccccagggacctggtcccctccagggtgactggggctgcggtgggaggcacagcttaacccactgcctcctcactgtccagaagaaaacccaaagcccgtgctcgcgtgggcattctgcctcctgctgccttttcctccccaaagccccttttaatttccttaatgaagtgctctcagtcatggaggaggggctggtggaaagggaaggtagaggacccgtgacaaacaatatcaggacctagtttaacctcagccctgacctcaaatctacccttctatgccctgtctagctgcatccctaactccactgatccttgtccttaacccagccccagacactcagccatgcaccccagcagtgcccccaaccccggctgctgttgccagccccaaatcctacagtgcaccgtcctctgctcgcggcaccctgcagcctgccgtgcccgctcctctgctgcgccgttcctccccacccacccatccctggctctgtctggcggcagatgtggctctggacttcgacgtctgagccagtcacatcttgcagatccaggacccctcatggagcctggagagtgagggcgcacaggagtccaccctctcctgctccccacgctcccttcttggtgcctgttctgttgtgagtggtgctatttgcctgcctccagtctctgttccctctacatattttattttattattattttttttgagacagagtctcactctgttgcccaggctggagtgcaatggtgcaatctcagctcactgcaaactccgcttctcgggttcaagggattctcctgcctcagccttctgagtagttgggattagaggcgccagccaccacacctggctaatttttgtatttttagtagagatagggtttcaccatgttggccaggctgctcttgaactcctgagctcaagtgatccacctgcctcggcctcccaaagtgctggggttaacaggcatgagccactgaacctggcctctgttccccctacataaatgggtaagagaaaccttccagaaaacctctcctggctgggcagtgcaggggaagagaaccctggcctgccctctgccaaagctgggcactagccacaggactttggcacgtcccctaacctctctgagcctttgtttccttatctgagaatcagggcgtcagcagcctcatcttgaccacatcagagggtagttacaaagattacacaggccaaggctcatctccgaaagctattcctcatgctcactctcctaaccaggttttgtcaacactcagtccctttgcactatactagatcttgatctcaggaactgtttcccattccccaggaagggcttcatgggccccacttgaggcccccttaaccaggagggcagctccctgaaggtgggacagggtgcccgccaccctgtctgatacgtgctttgcagataaggtggctcaccccatctgaccagctgccaccagctcctttgtaagggagatggggaagggggaggaacccagtgatatagctgcccaagcttctttcaccaaacaaaggctacgcggacccccccgccccgccaaatgtcccaggggtttaacctttccctcccccaacccccctgtcccccatctccccatccctgttcacctacattcagcagctggttggcctccttgctggcttggttgaccccattatgagcattctgcagctccttcccggcctggccagcagcatggtgggcaccttggccaagcttctccacttcctttccagcctggtcagcagcatggttgaccccttggccaagtttctctgcttccttcccagcctggtggaccccagtgtggaacccttggaccgctttgtctgcttccttcccggcctgttcaagggtatggtgaactccctggccaaactgccctgcctccttcccggcctcgtggaccccaggttggacaccatgaactgctatgtctccctctttcccagcctgccctgctgtgtggtgaatgtcgtggccaaactgccccgcctcccttccagcctgactaacgccatgatggaggccttggaccactctgtcttcctccttccccacctgcgaggcagcatggtggacaccctggccaaacttctctgcttccttccaggcctcattaaccccatggtggaccccatggccgagcttctctgtttccttcccaaactgactggcagcatggtggaccccctggccaaacttctctgtctccttccagccctcactgagaccatggtggaccccctggccaaacctcccagcctcatttccggcctgccccgcagcatggtgggccccctggccaaatctccctgcctcatttccggcctgccccgcagcatggtgggccccctggccaaacttctctgcctccttcccaacctgaccagcagtatggtggaccccctggccaaacttctctgtctccttccagccctcactgagaccatggtggaccccctggccaaatctccctgcctcatttccggcctgccccgcagcatggtgggccccctggccaaacttctctgcctccttcccaacctgaccggcagcatggtggatcccctggccaaacttctctgtctccttccagccctcactgagaccatggtgggccccctggccaaatctcccagcctcatttccggcctgccctgcagcatggtggactccctggccaaacctcccagcctcatttccggcctgccctgcagcatggtggactccctggccaaacctcccagcctcatttccagcctgccctgcagcattgtcgactccctggccaaacttccctgcctcacttcccgcctggttggccccgtgatggaccccatgatggatcagtttgtctgcctccttcccaacctgtccagcagcgttgttgaccccatggccaagcttctctgcttcctttcctgcttgtccaataccatggttgatctcatgggcaaccttgtccatgccgtggttgagcccctggacgcctttgtccaactccttgccggtgtggctccccatgttgctaagtccgttgaaaaccttctccacttcccttccggcatgcgtgattccactgttgatgccatccagggccttgcccacctctctctctgcattgctcagccctcggttgatcccttcaatgaccttctcaatggggtcatcgctggccgcccatccagacagggcccccagtagcagaaggagggagcaggagccgaccagacgtgcaagatgcatattgctgggaaggtcgggaaggatgcagagaggagccagggaagccacgctgctatttatcctctctccctctcgccctcttctccacccctcatgactcaattacccctgtgaggcactgagttggtcttcagtcaaggaggtgtttcccagggagatttggagttgagcaatggagaggaggaggaagagagggtgagtcatggatggagaagaactctggcatctttgctccttgccctccaccccagagatgggtgtctgcccttccaaccacctcctctttcattcctcacccactgtccaggcctcctctctcgcaaacccaccttccaccatgctccatccctgggatgcaggcaattcttcaacacctcactcctctcaggcatctaagcctccagctccccaggcagtgaggggctagaatgatgggaggcaccgtctggagaggggagaacactaggtgggatgaaggagtcatcagacctcgttcttgtgggccagcccctgccctcactcattccattccagccacacaggccttctccctgttccacaaacacaccaagctcattcctgctgcagggcctttgcacatgctcctctctctgcctggaatgcagaacccagatcttcacgtggctggctcctcctcatccgtacttgacttaaatgccaacttcgcaagaaaacctctcctgaccataacatggcattaattatactctgtagtatcacccttttgttttcacagaaaaaaaaaatctgaaattacctttattttttattgcctgtctcacctactagcaatgtaaattggtcgtgttgatcactgctgtattcctagcttcttgaacactgcctggggttcagtaaatatttattgactggacaaatggatggattcgaacaggccaaggaaagagactccgagcccgagtctgggtctcacagggtgctggagggaagggcgcctgggtcgccagggcagcatagagtcccttgtggagtgccgcagattttggaggcaggatcccattcctgtcgcagaacccagacctcctgcctcccagcccttgggcaagggcagggggctgattgccacgagctggaacaggacgcagtgtctcctgaaaagccggttgaggcagccacggggaggggccgaagacccagggcagcaggagcctgtgagccagaacctgggctggggccaggccctcatccttcctgccctcccgacatggggcctcctaagccccaacctgaagccccaagtgttgacatattggctcgggttggaggggaaacagctgagagtctggcctcaggcatgaaaagggcatcggaaggaagggcaggtggtggtgggcaggcttggggcagcagatgcatctagaagccagttgggagggaggctaagaccagaacgagagccagtgggtgggtacagtaggtgcaggggtgaaagatatttgggttttggtgccaaggggagagactgagagaggggtggaggtgggattgctggtgggaaggccaggcaggaacaatgtgcagggtgtgagcagctggaggtggcagagctatgtgtgtgggtgcccaggtgtggcgagaatctgcacgtgttttcaggctttgctcaaacaaaggcgccaaggcccactcccctcagaggacccggggttcctctccagctcctggacacttgactccacccaaagacaggcatcccaggacagatatccagaagcttctgccttctctgggctctgcctatagagggtgactaagtgtgccacctctccaagcttgagctcatcaaatctgtttcccggtttcacactccagggacaaagccaaattcctgggcaaactcaggtgtggtttttctgccctggtccagggccgaaatgatggagtttcccataccaggaggtggctgggcagagaagagtgggtgatgagtgtcagaatcctaacccacccagagatcaagaggtgggatttctcccactttgaactgtgttccatcttctttttgtgtttttggagggagagtctcactctatcccccaggctggcatgcagtggcatgatctcggctcactgcaacctccgcctcccgggttcaagtgattcttctgcctcagcctcccgagtagctgggattagccgggcacctgccatgatgcccagctaatttttgtactttcagtagagacggggtttcaccatgttggccaggctggtctcgaacccctgacctcaggtgatccgcccacctcggcctccccaagggcagggattacaggcgtgagccactgtgcctggcctgaactgtgttccatcttctctatccctctccaccccatcctttcatcttctgccagcctcagtccctctcctctgtctctctattcccatgtggcacgattcgattcaggacttcagcatctggctccataactgagaatggcctggagttgtcctttctttattttatttattttttttatgaagtatcactctgttgcccaggttggagtgcagtggcaatctcggctcactgcaacctccgcctcccaggttcaagtgattcgcctgcctcagcctcccgagtagctaggattacagatgcatgccactacacctggctaatttttgtatttttagtagagatggagtttcaccatgttggccaggctggtctcaaactcctgacctcaggtggtctacctgcctcggcctcccaaagtgctgggattacatgtgtgagccactgcacccagccaaaatcagccccttttgaatcctggttttgttgaggttatatttttcacctccttgattgtacaccaaaatgtagctccctttgtttaattaatcatctgtgttttggtctcggttcgttaaaacctcctcacctgtacacttagtttactttcttctcccaggccatcaaagcaggagagcctcaccctgccctggtcccatggcaggtgcttggcaaatgaatttctcatggatgttggcggaaggaagaggttatgtcattctgccccttcttgcatccatccctctctgggatggtgactccttcctggcacaaacccccactccccctgaaccttggtcacagctgcgtgtcaacctgctgtgcaggtgatggtgcctgcctgtgagtcactgaggtgcaagcaaacccctaccccggggctgcaggggagggagctgtttgtccacttgttctttgtcagacgttcattgaaaacctgctttgtattgttctaagtgctggaggcacagtcgtgaacaaacaaacaagaacaggagccctgtgaggggcttagagcccaagggggagacatcgaacaaataaaccaatcagtagatcatgacaaactacatgaaaagctacaaggaaaagaatgggtgctgcgagaagatataacgtgaagagtttgataagattggcgatcagggccgggcgaggtggttcacgcctgtaatcccaccactttgggaggccgaggcagatggatcacctgaggtcaggagtttgagatcagcctggccaacatggtgaaaccccgtctctactaaaaatacaaaaacaaaaaaaaaattagctaggtgtagtggcgcacgcctgtagtcccagctactcaggaggctgaggcgggagaatcacttgaacccaggaggcggaggttgcggtgagctgagatcgcaccattgcactccagcctaggcaacaagagcgaaactctgtctcaaaaaaaagaaaagaaaagaaaagattagcgatcagatgaaacctgaggaattgacatttattcattcaggtatagtttattgggctaacgcctttttcagacagggtcttgctctgtctcccagctggagtgcagtgacacaatcacagctcactgcagccttgacctcctaggctcaagtgatcctcccacctcagcctccctaataattgggacaacaggcatgcaccaccacacctggctactttttttattttttgtagatacagggttttgccacattgcccatgttggtctcaaactcctggactcaaatgatcctcccacctcagcctcccaaagtgttgggattacaggcatgagccactgcgtccagcccacaaacacctttcaggtgccaaacacttttcttgtcaatgggatacagaagtgacatagatgacgtccctgtcctctcagagcttacagtctggtggacagagacagttggcaagaaaacaaacaatttttagagagacatgtgctctaaggaaaataaaaacatagacagtgtagccctagagaaattttgcacactgaagcataactcagaatggagaagtcagacaaggcttcctggaagatgggcagaaattgggaagggggtgacggctgacagtgacagagaaaggagggaacttagatgcagagtgtagaaagcctctcttaaagggtgggaaaccaagaggcagccaagggaagccctgggtgggccttccaggcatacggaggcagcaagagtcactccactggagaatccaagggacagcatggaacctgtgtgcttcaagagacagagaagaggaaagggctttcaggaacagtgtaaaaggtgggattccaggctgggtgtggtggctcgctcctgtaatcccagcattttggaaggccgaggtgggaggatcgcttgagcccaagggttctagaccagcctgagcaaaagagtgagaccctctctctacaaaaaaataaaaagtaaaaatagcctgcagtggtggctgcacatgtagtcccagctactcaggaggccgaggcgggaggatcgcttgagcccaggagttcaaggctgcagtgagccatgattgcaccactgcactccagcctaggagaaagagtgacaccccgtctcaaaataaataaacaaatgataattttaaaaagtgggattccattccagacggcagtgcgtggccgtggaacggtgatgcatagcgtgctgacgtcccatgcctctacggggatgggatgcgatggtgtcaggcctctggcttgggcgccgcccctcggcgacgtcactgggtactgtgacgtcactgggtgctgtgacatcagggcaattagcccaggacccacagccctggcgctccgcacgcacctcggtaacatcacagcaggtccaggccaatgataaccttataagaggccatgtcgaagcgcgacatcgtcctcaccaatgtcaccgttgtccagttgctgcgacagccgtgcccgggtgagggaggcagcggagggcgcgggggaggggtggaaagggtagtggggagcgtctgcaccctcacacctgtgccgtatccctaccgcccttcctggcgtgtgcaccatctagggaccaggggatcagccgctctccctccctccacacccgccagtgtgctggcagagtggggtttactgccatggcggggagaccgggcctccgcccccagggctgggtgggcttcgcgccgctatcacgcggtagaaagagcagaaacgagggccatcggaggctgcagcctgaaagtggcgggaagtgggcgggcttaggaggggcttagggagaacccaggggtgctgggcttccatgtaaaagtgatgttcatggcgcttcgcgtgaggtgagctttgccctccctgtgatgcacaaaacaaggacacttggaaccttgccggggacgtgctgaccacttcgcaggcgagagctcagggaagcctcaccaccacctgagaaggccagagtgtgcccgcagtttacagagcggccaacagaggttaagagagggcaaactacttccttagtctctcaacaagggcggcgcgcccgcgcgcgcgcacacacacacacacacactcactcactcactctagccggaggaaccaggtcttccggtgggctgcctccattcccacactgttccctcacttcccaagggcgggggccgcaggggtaggtggggctggggctttggtccaggagaccctggaagacacaggagcagacaggcttaccagcctcatgagacttgaacccctgccctgcgcatcactgctccgtggcctcaggcttcattttcccctctgtaaagtgggtttatagcgcatgcctctcgggattcagtgggaggacgcagtgaggagctgggggcagcacccagctagcccccaggcttttctccaaccgggggaccccacccctacagtggaggggaagagagtgcaaggctgggagtgctgggagaggaggaccatctgagttttcttcggaagggtcacccattgggctcagattcccacctgaaccaggtggacaaatcccctttctcccatagcagaaacaacccccaaggatgcaaacatcctcaagttcaccaataaacactaacaccttcatgaacttggacagccactggaaacacctatagtccagcctcaggccacaaggtctgtggcaacagggagaggtcagggagacagacaggccagctggcccccggctcccagccccaccaccccccaggtgcctttgatttggtgccaaaaacttggactcccactacccccttccagcccttctccaccccctgctgtctccctttcctcaggaatctgtgtaggatcagacttccctcctctattaaaatcagctcctatgtgtgggcctcgagatctcactgcgccctcacagcagcccctaggtgggggatcagccccaagaggttcattaacttgctcaaatccacagagcagcaggtctgtgtggactgagccaggcttgactttccagcttgaaactctctgccaccaggtcccctgagtctccacttctcccctcttctcaagccctcctctgtagctcaggcggctgctacctccaggcgcaggtgtttttaagtgcagtctgggagcaggagtgtgtgtggagaggtgggagccaatgtgagcttccatgggtttcacagagtatgatacacggtactctctaagcttccctgaggataagaaatgcctggagtgcttattttattttttatttttttttgggagatggagtttcgctcttgttgcccaggctggagtgcagtggcacgatctcgcccaccacaacctccgcctcctgggttcaagcgattctcctgcttcagcctcctgagtagctgggattacaagcatgtgccaccacgcctggctaatttttttgtatttttagtagagacggggtttctgcatgttggtcagactggtctcaaactcccaacctcaggtgatctgcctgcctcggcctcccaaagtgctgggattacaggcgtgagccaccgctcccggcctggagtgctgattaaaaacaggatttctgggcctccatacagacccactgagtccgatttttctaggaagagccctcctcaggtgatttttttttttttttgagacagagtctcactctgtcgcccaggctggagtgcagtggcgcaatctcggctcactgcaccctccgcctcccaggttcaagagattctcttgcctcagccccccgaggagctgggattacagtatttttagtagagaacaggtttctccatgttggccaagctggtcttgaactcctgacctcaagtgatccacccaccttggcctcccaaagtgccaggattacaggtgtgagccaccacgcctggccactccgacgactcctatcatggaacagtttggggaccactgggctaaatcaattattggacaaattcggggaacaatctacaaaatactaatgcatgtcaaacatttcctcggcttggtcataagcaatccatgtattacctcatttaatcctcacaacaaccctctaagaaaagtactattatctccccttacagaggaggaaactgaggcacagagaatgtcaccccaagcgatctatgttgaaagtacataccccggccaggcgcagtggctcacacctgtaatcccagcactttgggaggctgaggcgggtggatcacctaaggtcaggagttcgagaccagcctggccaagtgaaaccctgtatctactaaaaatacaaaaattagccaggcaccttggcgggtgcttataatcccagctactcgggaggctgaggcaggagaatcacttgaacccaggaggcggaggttgcagtaagccaagatcagtccactgcactccagcctgggtgacagagcaatactctgtctcgggaaaaaaaaaacaacggaagtacataaccagtgaattagaatctccaggaaagagcccttgggattgacattttaaacaagttcattctgtagagaaagtgggtttgggaaacactgggctaaatggttggtcacgaggggccaggagccagcaacagattctgggcagcaaagacagtttgttctctttcactttggtggtcatgcaacccattccctcccttcccccgcatagtgaccagagcaccgcccccacctgagcctaaggctgaagtagagccccagccacaaccagagcccacaccagtcagggaggaaataaagccaccaccgccaccactgcctcctcaccccgctactcctcctcctaagatggtgtctgtggcccgggagctgactgtgggcatcaatgggtgagtctactccagcccctgatcagtctgaagccttagagcccagcccctcctctggctgctaactgggggcacctccacatttccccccatcaatgctttcgttccgacgaccctggagaaatagcccggagcaaggcagacagggccccatgctcagcagcatgctggtggggaagacagtaatcaaataaagaaattagattgttcagtagagtgtgctgggaacagtgtagaatccagtggaaaagtcaggctggagagggcagcctttgccagtgatcagggaaggccttggggagaaggtgtcattggagcgggaccagagtgatgagacacagccagctcccagggcaccttgctggggaaggagtcttccaggcagcgggacaagcaatgattctggggcagaggcgagctcagtatgttcagggacagccaggaagtcagagtggctggtgtccaccaagcaaagggaaaaggagggaggccagtgagaagcccggagggggctgctacaccacagtaaggagtgtggatcttgttttactgatggacagtcgtggatgttttcatgccaagagacgtaatctgtcttgaagttttaagatccatccaggctctcacacctgtaaacccagcactttgggaggccaaggtaggagaatcctttgagaccaggagtttgagaccagcgtgggcaacatagcgagactctgtctctacagaaaaaaattgttttaattgtttaatgaaaaaataaaagatccatccagctacaaggttaagaataggggttaggagccaggcgcagtggctcacgcctgtaatcccagcactttgggaggccaaggcgggtctatcaacttgaggtcaggagttcgagaccagcctggccaacatggcaaaaccccgtctctattaaaaatacaaaaattagccaggtgtggtggtacgcgcctgtagtcccagctacttgggaggctgaggcaggagaatcacttgaacccaggaggcagaggttgcaatgagcccagatagcgccactgcactccagcctgggcgaaagagctggattccatctcaaaatatatatatatatatatgtatatatgggttagggaacggattgggagagggagctgaaaaagcagttaaaggggctggtgaggtcatcttggcaagagatgcccatggccagcacagaggttgttgccttcttcccctggattaaggattcccaaccaggctccttgagggagcctcctctccattacccccttctctcccatcccttcctgtctgtccctggccagatttggacgcatcggtcgcctggtcctgcgcgcctgcatggagaagggtgttaaggtggtggctgtgaatgatccattcattgacccggaatacatggtcagtagctggcagagggcaggaacagcagggtgggactggggtgggaaagggactcagggaagctgtatggaaggctctcagctgtaatgtgagaccttcaccaaagaggggactctctagggatcctcaccctgccaccccaagactaggagccattccatcccccacaggtgtacatgtttaagtatgactccacccacggccgatacaagggaagtgtggaattcaggaatggacaactggtcgtggacaaccatgagatctctgtctaccagtggtaaggaaagcatctgtctgatgcacggctgtgacatattgaggcagggcatgtggaggtggctaaaatgggattccagcctctcacatggggtgctgaaaccacccccaaaattgcgtgtgcatgcctctaggtactaatttgaagagggaagtctcaggtccttcacccctaaaatgattaagaagcactaatctaaaaagatgcctcactgtactgaagaatgctttttctttatattttttttagggacggggtatcactcttttgcccagtctggagtgcagtggtgtaatcatagctcaccgcatccttgacctcccgggctcaagtggtcctcccacctcggcctcccaagtagtgggcaccagccaccacacctggcaaattttttgtagagatgaggtcttgccatctggcccaggctggtctcaaactcctggccccaagcaatcctcccaccttggcctcccagagtgctgggattacaggcaggagccactgcattttgctttaacgcacatttgcatgttttctcgtgggcatatcaacatgtccagaactcaactcttgattccccttcaacccacacctattcagctcccattgaccactgctggtcaactatgcctgaattccaaagggaggaaggtataatgaggcttgtgcgaacatccgaacatccgttcccatcatggcctgaaccagtgtttcagttttactttagaatgccctgggccgagagaagggctacattcagttagttgggggagtttagaattttatttttggctgacattcacctttctaatgtaaactattagcgactcctggctctgtggctgcctggggcttttacacatacacacccacaggcccacacacatgcaaatacacacaggcacactagtgaaccctgtctgggcccaggcagggtctgcagcctccccagcgcccctccccacagatctaatctcagcccttctccttgtacttactgggggtagggtgagtgataaaggggcagggatgggtgcaggaagtttgtgggcagggggcagagactggagagtcagtgaaaattgaagaaagctgcttaacccaagtttgaaatcatgacactagaaacaactccagcaccatagttatcacgcagacttcaacgtggccaccaccattaccgccacttggagtcatccctcttccccacctagctgccccctccgtccacggtcccgactcaggtcttgccttctctggtcacttgtgcaatgcagttccccgcccctccagccccctctccatccccgcactgttgggctgcacaagccaggctgtgtgcctgcactctgccctgcacctccgctagctagctgggtgaccttgggcaaggaaccaaacttgcctgagcctcagttccccgctgtatctgatggggatgatgagcaaacccaccacagcggtagctgggagcacgaatggagtgaacatgtgtttgtggacacttaaacgggcacttcccacaaggccatggccttgcacggagggctctgtcaactggtaccaccactgttgctctggcattagcaggtacaggccctgatagccattcagaacttcctttgaatgaatgaatggaatcctcaaaacagcctggtgggcaggaggctggggcccatgacagccttggggagggcctggggtcttctgggggcacagtctttgcctcaggccaactcagcaattgttgcagaggaatcgcaagtgtccctaatttggaaggcaggaaatggggggtatctgagaagagctcgttgggccagatgatggaaagtggactgacagagcaggagacaggaagaggataaccatgcatgtgtgatggctttgcagggcagcccattcattcattcattcaggcagtggaaacaggagtgcagacccgaggtgggaccagccacctgcactccagcaggctctccctctcactcccctcccctctgccctgacagcagtaaaaaaatgcaaaaaatgacagcggtagcacttcctcatcgggttgtgaaggttacatgagtttaatgcaggtaaggcacttagaatatgggcacaggacaggtgttcagtaaacacgtataaaatggctaactaaaaaaaaaacacgaggccaggtgcagaggctcatgcctgtcatcccagcactttgggaggctgaagtggggatcacctgaggtcaggagtttgagaccagcctggccaacagagcaaaccccgtcaccactaaaaatacaaaaaacaacaacaataaaaaactagccaggtgtggtagcgcatgcctgtaaccccaactactcgggaggcggaggcaggagaatcgcttgaacccggaaggtggaggttgcagtgagccaaaatcgtgccactgcactccagcctgagtgacagagtgagactctgtctcaaaaacaaaacaaaacaaaacaaagaaaacccatgaggccaggcacggtggctcacacctgtaatcccagcactgtgggaggtcaaggatcacttgagcccaggggttctaaagcaccctgggcaacaaaagtgagaccccatctctacaaaaaaatttaaaaattagcttggcatggtggtgtgcgcctgtagtcccagctactcgggaggccaaggcaggaggatggccggagccaggaagatcaaggctgcagtgagctctgattgcaccactgcactccagcctgggcgacagaggaagaccctgtctcaaaacaaacaaaccccacaaacattgattgaaccccccattgaggggagcaggctcaatggcaaaggaaacagaccgacactggccaagaatcacagaagcaaagcacccggttactcatgataaacctgggaaggaagaaagtggaacagtttattcacttaatgcttgtttgctaaagccaagtagaaaacggcaatactagatgtttagtgtgcttcaaatacaaatgtttgtcaaaataccaagtaaaaacataaatttataaaacaggaaaccagaaacctcccttacctttccaatgtaaaccatgagccactgctgccccaaggctgcctcaggcttcaggagtcctccaggagctttttctttaatgcagtgtctgttttcagggaccctcctggcctttggcagccagcttcctattgcaggagctgagggtctaggagggttcatggcgaggttgtcagagctgggaagcagaaagcagccgggcaggcctcacagtcacagagtccacgtcccgggcagcatatggagaaagggtctgggctggctgacagcagtcagcattggcgcctctgaggaggttgagggctgagttggggaggtcaccacctgtacccaggcataacaggggtggtgcaatcagcaaagggaaagtggtctgaagtggggcagtggtgaaaagctaggccagcggggtggagcccatctggaacaagtaggtgtgtggggtaggggacgcaggtggttgcaggtgggccggtacctgctcagcctgtcaaatggtgaaagccatggactatgaaggtggggctcaagcaggggagactgactcagccctgccacttccccacagcaaagagcccaaacagatcccctggagggctgtcgggagcccctacgtggtggagtccacaggcgtgtacctctccatacaggcagcttcggtaagctggggagaggtgcccagggctagctggggggatgatggtgccagaagcccctgacacctgcgcttcctccccaggaccacatctctgcaggtgctcaacgtgtggtcatctccgcgccctcaccggatgcaccaatgttcgtcatgggtgtcaatgaaaatgactataaccctggctccatgaacattgtgaggtaatgtgggcagtgacatcctgcaatgtgtggaagggagggtagactcgtcctccccaccctcagccccactggattcctggtcgcttggcttctgcttctccttcccgaaactatctgctaaaaacgcatgacttccagaggacaagcttggggagcctccccagctgcacctcagtgcctccttcagtctgacagtgtccccacagatccctctcaccctcatcctgacgtttcataaaaccaagtctgcgtgcataccccaagaggggtaagggtggaggggtggctctgcgactcacctcacagtgtccgtgcacaccttggctgtttcagcaacgcgtcctgcaccaccaactgtttggctcccctcgccaaagtcatccacgagcgatttgggatcgtggaagggttgatggtgagttgaggatgaggggctggggcaggaaggatggcagggaaacccaacttcttcccgggccttgcttactgtatggagttaagagggagagactggtttcgggaggagaggcccaccagtgcagaagtcacttaaaacactgtgcaaccctcaggcaaggctggaccctggcctgcacacatcccctcctgtggtctgtggtggtggccccaccagcctccacacctaggccaccaacttagtcctggaaaaaagaggcatgggagcttaggagcatgaaggcctcatcttggtccttctcttccccaagaccacagtccattcctacacggccacccagaagacagtggacgggccatcaaggaaggcctggcgagatgggcggggtgcccaccagaacatcatcccagcctccactggggctgcgaaagctgtgaccaaagtcatcccagagctcaaagggtatgaggacaagaagctgcaaccagggtgggggcatacgccaggaggactggactggcccggccctcagtccttaagaggaaagcaggggcctggcccagccacagggaaagggggaatggagggcaacgtccctaagttctgactcctgttcctcatgggggattctccaggaagctgacagggatggcgttccgggtaccaaccccggatgtgtctgtcgtggacctgacctgccgcctcgcccagcctgccccctactcagccatcaaggaggctgtaaaagcagcagccaaggggcccatggctggcatccttgcctacaccgaggatgaggtaggggctgaggagaggagaccctgggaggagccctctgggaagggacatgatttccacttgccagggagctgctctcaatgtgccaagtcagaaactgcagggcaggaagggagatctccctgcctcagggcctttgcacttgctgttcctttagtctggaatgcttcccttgccaggtgaccatacagtctgtccttacttcctccaagtctctggaggaacctccctcttcagcaaggcaccccctcaaaatatgttctttttgtggccatattcctcacctgaaatttcatttcatagtcactgttggccccagtggtgtgtgcactccaagaaaacagggatttaggggctgccttttcacttttgtggctccaacctggcatacagcaggtgactaatacatgcttagtgaacaaaagacaacagctcccatttttttcaatacttgctcagggccaggccatggccagatgccttctctgtgaggagtggatgccatggtcatggtggacccctgtacatccaccttggtgctgtctccctgcattaactcctgcaggtccactttcccacagtcactgggatcttttgttttaatggaatcacattgcatcacccgttttcaggattgaaaacactcctgtggcctttcatgacactagggctaaaaccctcaggtcctcccttcctgcagctccttctacctcagacactgtgctgagggccccagccggtcagatctttctagtcatctagacccaggctcatggccacccctcagagaggccctccatgctggcccattccaaacgcttgcattattcctaggaaagggatgtactggtacagcatgagggtgtttgtgacctgtgccctttggccagaccctgacacagtgccttggtcataccctgcacttggtcataccctccagtccagagactggacacagtagggctacatcaaatattatagatgaatgcatggatgggcgatagagttaagagtcggggcctcagctcctggaggtccttgctctgccggacacacttatctttgaaattctgacttccaggtcgtctctacggacttcctcggtgatacccactcgtccatcttcgatgctaaggccggcattgcgctcaatgacaatttcgtgaagctcatttcatggtaagggggaaggagctggagacttagagggaggggaactaaggggtggtcggaaggaacccccttgaacctcccgacccctcctccacaggtacgacaacgaatatggctacagtcaccgggtggtcgacctcctccgctacatgttcagccgagacaagtgaaacgggaaggtcctttctttccttcccaggggccggggccggaacatgtgcctcccgttccagcatctggctgcccgggggaggaaggacacccggggcgggcgccccacgccgatgggtccatggtgaaataaaaaacagtgctcacggctgcgtcccgtatctctgcgccggtcagggcgggttctgatccgggtttgaggcccgccccacccttactcgatcgcctgcgcccacgggcgaggggtcgcgctcgactccaagccgggttccacttcaggagaccgggaccgcgatggcagcggtagaggccccgcatggccggaagtcactccccaaagcgctgggccggcagcggtgggacccagggccggccacgggctctctgacgtcactgggcgcgacgccccgcgccgggactactgctcccagaaggtcgcgcgcgggcccccgccagtcaggtgggtgccaggccctggccgtggcgaaagagccggcggagccggagacccgctcccggagacgccgcctcgcgatccccgcgcgggcgggaccgggcggccggcatcatgaccctgtttcacttcgggaactgcttcgctcttgcctacttcccctacttcatcacctacaagtgcagcggcctgtgagtgcgggaagggcgcggggcggagagggcgcggggcccgggccgaccctcacctcccgcttctccaggtccgagtacaacgccttctggaaatgcgtccaggctggagtcacctacctctttgtccaactctgcaaggtgagggccaccgggaagccacgtgttctggcccccaggctctgcagacccagggacccgcccccgttgcctatccgcgcccccgccgccccacggtgggaccgccctcgggactccgcactgggaggcgtcaggatacctagagaggatggactttaaagagggcacgacctgagaagagacctagaagcaacttttgcgtagcacttagtaaaactgagaaaacctcagtagtgtggttggctaacaggttttttttggtgcggttaagagtgatcactgattccgtacgtgctgctaacactgcccaaggagcagcaccttcagacctgactcagatgccctgtgatcacccagaactcaaacttccagccccctcggggacccggggacctatcctctatctccccgattcctgtaattttgccaccatctggtggttcctcttccagatgggcccccagaacctgtcctgccctcttcctacccacgaacttcccacaaatcccacgtggtttatcttgatcccctcaccttgaagtgacctctttctgctttctgttctcagatgctgttcttggccactttctttcccacctgggaaggcggcatctatgacttcattggggtgagaggggccagggaagggaagggagttcaggaatggggctccctgtccccctgtgcttacttaagcctcaacctgacccgcaggagttcatgaaggccagcgtggatgtggcagacctgataggtctaaaccttgtcatgtcccggaatgccggcaagggagagtacaagatcatggttgctgccctgggctgggccactgctgagcttattatgtcccggtgcgtacagcagcctggagcccagacccctgagaagggacacctgggttccacgggggtgctggagggcaggggctcaaagcctggtgctgaaggtgtctgagtactggagaatcccatcctttgccttcctcagctgcattcccctatgggtcggagcccggggcattgagtttgactggaagtacatccagatgagcatagactccaacatcagtctggtaggcagtcgtgctctcccacatacacatttctgctggcggccatactcctccccaaggcctggccccgactttctgcctccctctaggtccattacatcgtcgcgtctgctcaggtctggatgataacacgctatgatctgtaccacaccttccggccagctgtcctcctgctgatgttcctcagtgtctacaaggcctttgttatggagtgagttgggtggggtttagggctgggtccaaagtggggtgggttatctagtctcccttccttattgtgacattttcctgcaggaccttcgtccacctctgctcgctgggcagttgggcagctctactggcccgagcagtggtaacggggctgctggccctcagcactttggccctgtatgtcgccgttgtcaatgtgcactcctaggcttggtgtctcagacattgatgtaccttttccctgcctcactccaggttttagtgaagtaaacagtatttggaaagttgttgctgcctccatttctctctcttgggaactgtctcccaataccgtgtccacctgggtctcagaggccctggttctgtctcaggagccaggtagacaagctggaagctagccagtcactgacttgtcccatgtcttgttcctcaggctcctggtttgccaggagtagacagaaggtttggatgatctttgagcagtggcagaggccagggccctcagggaacagatgatagaggggagctagaatccaagagaaggcccttggggggctcttcctcctcacagccccaacctgggcctcctcacatgggcccttcccgggctggttgcctctgaggctcctggccccagtgtccccctccaatccatcctctgtatggcagccaggggatctatctgaaacccgtctaaccaggtcatcctcccacttgcagccacttgcggccccttgttacacagtggacagtccaattgcttggcctttggttttacccaaccagcaaaaccagcttttctgaaactgctccctagaataatttgtccagccagattcttaacatcgttcaagccatggggtcagcatggggctggggggagagttgtgactgtgagctcctcagttctatggccctcagatcagatcccagcctgagccttctcagggtggagtggagagacagctgcagccaagaagcagagcagtggggcccccagcttggacattgtcctggatgcccccctccaccctcagccttccttggtccactgaagccggctccccgcctttctctgagggggatgtgtcagaagttttgaatgtcatgtttaagctccactttgatgtacaccctccccactcaggaagatgctccccatccttggtgttcccagtggggtaccccagggagtaggatagcaccattgcccctcctcctccaccaggccgttgaagttccacctgattttttttaagcttaggcctaggaaagctcactatgaccatctcgatgtttccagagggagcatttgccttcagacggcagctgccatctaggccactcttcctcattgtttggagtaaagacagggtccatgggtctcttgggagctggaagtgattgatcaccttgactttgatgtagaaaggaagtagatggggcagtctatctgggtggacttgtgacaaggtcactttctcccacacttccatgccccacatagctcttcacacatattgagacaagtgtaggatgcaaaattaccaactggaataatcccagcttacatggggttcagggagagagactggagtggctgggcctgagttggcagaggacggtgaagcctgggcggttggactgtggggagccaggcttcaggtgatcggggttatgatgggaaaaccccgggttatggggacccagaggagccgcctggcctgccgtggaagcagtgcgggctcccctgagcagaggacatgtgagctgagacctaaagaatgagtgattggggcaaggcagaggtaatggtcttgaggtcagagagggggcctgtttttcccaagggaacataactggttggaatgagttcaaggggacttgtaagactacagaagctggcaggggtcagatcacaggaggctttgggaaccaaggagagctctaggcagaggaaggacagggtcagatttggctttaggaagctctgcatggctgttgtctgaaatgggaaagctgaggccacgaggccagggctggaccagggcagggctttgtggggttaggagagtgactagaagccaagcccaggtgttggtgatcagtggctgtgtgtatttatttaccggcagggggcgctaacaggtaagggaggagcaaagagttccaggataactggagtttggggcttgtaagcccgagggctcaccacgtttccaagggagaagggaccacactgatgggacagtgggactatcagattgggtcagtgcatgggtacaggcatggggggtgatgaagaggccagtgtaggtcaccaacactgggggaagctggggacagaggtgggtctcactgcagaaacaactgaagccatgggggactggggggctgtggtcacaaggaaggagaagcccaggccctagccagagaaagccacataagaaagaggaagagaggtgaacagaggggctgggaaaggagcggcagagatgggaggtagggggatggggttaacctttcaggtgaggggtgtgaggaggggacctccaggagttgttcaggaactggccattgccgggacagaggagtaagcaggtaggctcagaaaggagacaccgctggggggtgggggatgcttgatgtggaaatgacttgggcccccttgtgtctgggagcctccaggagggagaagggtgctgagaacagagaaagcccagaggtggtagggggtgcctatcgccacggcccagcttgcgtttagatgccatgaccctgggcaaaggaataggaatcatttccccaaggcaggtttattgaggacctactatgtgccaggctgtgtactaggcactggaggtgcagccctggataaacagcccccatgtacaggactgtgggagatcacaagcactaatgagagacgctgaggacagtgcctggcaccagatacagcacagtcagcatgagctggttttattaccatcgcccaggacacaagcgtgtctttaacgaagggccctcaggcagccgtccagcctggactggagtcctaagaacagaaacaccctccagaagcggtcagctgtactccctgtcagagccccaccgccaccacaggtggcggctttcccgaggccagcccagaggactgcccaggcgctgctgctccaggaggtgcgaaccttgggaatgggggaggggagtgggcaggtccctccaagtttggggtgccgtgggctacagaagcagatactggtggggctgggactcttggttgctcagatatcttggtggctgtccagagggtcccacgagccctgcccccacctgctgtggcagttgcagggatgcttgaaggcagtcgtccctctaatagtagagttcctggtcccaccagcctgggagagagagggagaaaggagactcagtgctgggggtgccacttaggcagggccaggggctcagaggtcagtgctggttgctatggagggtcaagggcttagaggccaagtgttgaggatcaaaggtgggtgcagctgctcaaacgtttcagtcccctgcccccaggctcccagtctccacactcactccctgggcaacagcgaactccaagcttccggatctcatcatagacgaagatgaggatgccgtagggcagggggaccagccaccactggaacctgaaggcacatggcaaggtgaaggccatcccaggcctgtgccctacagccccctccctgtccttgcccctcacagcctctcaccgaatgggcatgaagttgaagatgttgggcatgccggggcagtagcacaggaagcagccgatgcagacctggaacacgatggcgatcaccaggatcttattcctgggggtgggcagaatgggacaggccattaggaattggggacgtgatggaaatcaggatactgtgggtcaaagtaggtcagatgtcagcagcagcagggaggtgttctacacactgaacactggagtggcccgggcctctcagcaccacccctttagtgaaatgtggagggggccgtggggggagttattggccagttagaaaggtttttttggcatgtcaccatctggcactggcacccgctggcatttgccggctgttctaaaccacagtcaggatctgatgggagttgggaccaggggttggagggcaggaagagggccagccagggacacctgaagaagccttgctggaaggcagagagacggcgcgtcttgcggatgaggacatcggcgatctggcacacctcaatgctgatgaagaacacggtgtagcaggtgtactgctggtacaggcgctgcccgaatgtctgcaggccaggggcaaacggaaacagcctgagtccagcctgagtcccggcggagagcctctgcagcccaccgggcatagggtcccagggccgtgaacccctaaatgctctctctgccttgcatcagagtgtgggggtggggggaaggagagaggcagggtctgccaggtgtgcaggaccccagaacgtggggcccagaaacctcagcctagcagagcttggatgacagtggccgggaaaactgtaggctgggccgactgctttcatagtgaaaggggggaggcacccaaaagaaagggcctgggaaaggggaattgaaatcctcagatgggatttgcaaagtccagtgactccaggggccaggcagatggcaaaaataggtgaggcagtcaccgcgggcctttgggaaaagagggcagatgccccatttaaagggggcagccactatgcagcccatttcttcaacacagctacttttttttttgagatggaatctcgctctgtcacccaggctggagtgcagtggtgcaatctcagctcactgcaacttccgaatcccaggttcaggagattctcctgccttagcctcccaagtagctggaattacaagcatgtgccaccatgcctggcaacacaactcctaataccagctaactgtggggatcactgactgctccaggtgccgagtgttgcacgtgcattagctcatttaatccgctgggtaaccctaggaggtaaatcagtggtgctggaacttgaacatgcatgagaatcccagcaagggctcccagagggctgggatagagcctgagaatttgcactgcaaacatgttcccaggagatggtgatgctgctggtctgggagcaaactgaaaaccactgaggtagactttgatattctctccactttgcaggtgagaaaacaggcacagagaggcaaagcaacctgcccagggttacacagcttgtgagaagcagtaccagaccataagtccaggcagtctggcttcagtgtctaccttaaccatgatagtaaatgtttaagggaagtatcctcgtctgtatgtaactctacaggtgaactaaacacatctgctggccagatctagcctcactgtgctccaaaccttcattaaaatagaccacatgtgcaaataccctgtgggagtgatgctgtagggaaaatagcagaataggggcctggttccacatctgagatgatgcattagtgtcagggcagagacacccatctgcagttgcgatcatcagaagcaggagtttggagctggagatggtgggaaaggcccttgcccccccgaactggcagggagtctgggggtccgggatgctctggctgaactcagtcacacgtggaggaacaagtgggccgcacacaaggcaagttgccctgggaaggagggagcccagggatgggatggggcggggcagggctcacccactcctggccgtagctgtcctgcagatcttgtaggtggtggtcctcccactgcgcccgcagccccacgcacagcagtgggaaccagccctcctgggccattgccgtgaagtagtcagtgaagccagcaaaggactgaatggcacctggagagagacaaggggacacagggagacagagatggacacagagacagggacacaggaagagagggacatggagagacagggacacagatacacaaaggtcaaggacacacagacagggacacgggaagagagacagggacacagatacacaaggtcaaggacacacagagccagggacacagaaacagtgacagagacacagaggcagagagagaagcagggacagagagacagaggcagggacagagagaaaaagacacatccaggacccaaaaagacagaaataggcaacaactcagagacagggtcatggagagcaaggtcagagagagagcagggacacagcagaaccagagagactgtcacaaacagagagggacacggaggacaacggagacccaggaccaaatgcagacactgaggtccagaaccagccggagcccaaggcagggcctggggcaggcgagcagcccagcgcagagccccccacctccaggctccccggcccacgggcacccaccaatctggaagtaggagtaggcagccaggggctcgttgaccaatctgtcacgctttgggttgcgtggacgcaggtgcatgatgtcactctcggccttttcatatgccagggacacagatgggaactggccaggagtggaaggaactgggactgagggtttggctgggcccttgtcccctccacttcgggtcccccttcccccacttgtgagcaggaacaggactgaggttagcaggcaggacctgcagggacggcacagccacaccagcctggacagcctgggccccactggcccctgggtgttggcatcctggtgcccatcttcgtaagaacatctgcttttatcttctccctctgtctccctccctctctttctctgttcctcactctgtttctctgtccctgtctccagtgtaattctctgtgactgtatctgctcttgtgtatttctgtgtcactccctatctctgtgtatcttcagtctctcagtgtcgccgtgccccttcatctgcttgtgcctagagtggcagcagagcatactgaccacgaccacaggctgtgggacctgtgactgctcaagctcaagtcacagccgggccacttatttgcccagtgacctgggacaatccactctacctgtctatgccttgatgagctcatcagtaaagtacgggtgatagtaacaaaactcatctcatagtgtggttatgagtacaaaattaaggaaatgatggtgtgtctggcccagagaaagcactgtgtaaatgttaccgaataaatacctgtcaacacagctgcgcctctggctgcattcgtgactgtatctgtggttcttttctgtctgtctgccatggggtctatctgagggggtttatttgtccgtgtctgtttaggggcacgtgtctgtgattcaagtttggccagatacctgttctgtttccatctctgtctgagtatctgtatctgagtcatgtgtgtgcatgggtcggcccgggcctacctgagtgtccgcctgtgtgtgcatggctgtatgtccatttaggtctgttcacctgcctgccacccatgtgtcctgcactggctgtcattgcacacacaggtcttgtctgtcactctgtgcccaagagtgtctgtggtggtctctgtccctcctgtccatctgcaagcaagtgtctctgggcaccctgtggatgggtaccctgggctgtggacttacaatgtcagtgcagagttcgatgaagaggatggtgatgcacccgaggggcaggggcacgctgacggtgatgtagatgaggtagggtgtcagctctgggatgttcttggtcaatgtgtaggcaatagacttcttcaggttgtcgaagatcagtcgacctgtggggtagggtgggcacctcagcctcctcacagccctctccctcctgtgcccacactgcctgccctccccctggcgtggctcggaccctgctccacgcctgtcacaatggaggcaaagttgtcatccagcaggatcatgtcagctgcatttttggcagcatctgagccagcgatgcccatggctactccgatgtctgccttcttcagagctggggagtcattcacaccatcccccgtgacggccacaatcgcaccctgcaggcagtgggtgcaggtggtgggtgggtggtcagtgagaggccggtccaagaccagccccgcctgtctgcccgcctgcccaccctcatcagcagggctcaccagccgctggcagctctccacgatcaccagcttctgctgggggctggtgcgcgcaaacaccatctcggggtgggtgcgcagggcctcgaccagttccgatgggtccatgtccttcagctgcatgccattgatcacacaggcacgggcatccctggggaggagatgggaggacctcgctgggacctcggtctgtgccagatgtggggagaaccccggggaggtctgggggggcttacttgcgattaacctggtctacgggcacacggaggcgggcagcgatgtcctccactgtctcgctgccttccgagatgatgcccacactggctgcaatggccttggcggtgatggggtggtcacccgttaccatgatcacctgtagggggaaccagtggatcactgaccccttcagatcagcccaatctccctgtcctccctgggagacatctgctgatacacgtgttcatttacttgaccaagcgtgaccacctcctacgtgcctgggatatagcagagacaaaagagacaaaaatccctgtccttgaggagctctagtgagggtgacagaaaataaagaaacgaattatatagtgtgttagaaagtggaaaaaaacatattaagcttggtgaaggaaacggtgactcgattttaagtgtacccagggaagggcttattgagaaggtgatatctgagcagagacctgtaagaggtgagagagtcagccacgtggaaagctgggagaagagtgctcctggcagggagaacagcaggtgcaaaggccctgaggtgaggacaggcccgaactgtcggaggaacagcagggaggacaccataactgcagaggagtgaacaaggaaagagggctaacgaacaagcttagaaaggtaacaaggcccgatgtaacagggccgtagagacacgggaagggcttgggcattgcctgcctggccttggctttcccacccttgttttgtgtttggggaaccactcctctcccctacaccatcagttgcagtgaggtccctggctaagattgggtaagtaagcccagacctggccaatcaaggtcttccatcccccagccccagtgactggctcagggataaatgagtgacccaatccagtgctactgcaaaagaggcactctctttttgtggggtggctaagcaggtgggagttaagtttgagctgctggagcaggggtgtgtgtgtccccaagtgaagggagtgcctgcaaataaagccagcaaagagaacagcagagctgagacatggagaaaggaaaattcctaatgacactgagctcctggatc

SEQ ID NO: 895 - DNA, 2776 bp, Homo sapiens
ggaaaacgacacctagaagtaggagtgagattcgctgaagttcccttctgaggaagacccacccctccgcctggagagccggggctggcggtgcctgaggaccccttcggcctggacagcccacgcgggcttggggggcctcgctctgccctcatggggcggccatcggttcccgaagcggcgagtgaaaattcaaatggccagtagggggcgcactcggaagtggccgccccgcatgaggcagttcagcggccccgagagtccggggagggaggtttattctccgcctgcacgagactgtgaaatccgcaaccatgagcaggagaggcggccctggtggggaagaggccaccaacatctggacggcaggtacccagagagtgagcagctccacgcgggactgtgcacggtggccgacacccgcagggacgcccgccggacgagcacgcggagggccctcgcctccacggatgcaccatgccggtgtgaggagcatctgttcttcccactctctgcagttaacaaacccaacccaaaccaccacaggtgctcctcctggggagtttcctgtctgacaaatgccaggctcacttcaaggagaatcacgcttctttctaaagatggattcaccatttaaaacagagctctgggagcctttcggcaaatcttgaaagctgcacggcgcagagacatggatgtgacttcccaagcccggggcgtgggcctggagatgtacccaggcaccgcgcagcctgcggcccccaacaccacctcccccgagctcaacctgtcccacccgctcctgggcaccgccctggccaatgggacaggtgagctctcggagcaccagcagtacgtgatcggcctgttcctctcgtgcctctacaccatcttcctcttccccatcggctttgtgggcaacatcctgatcctggtggtgaacatcagcttccgcgagaagatgaccatccccgacctgtacttcatcaacctggcggtggcggacctcatcctggtggccgactccctcattgaggtgttcaacctgcacgagcggtactacgacatcgccgtcctgtgcaccttcatgtcgctcttcctgcaggtcaacatgtacagcagcgtcttcttcctcacctggatgagcttcgaccgctacatcgccctggccagggccatgcgctgcagcctgttccgcaccaagcaccacgcccggctgagctgtggcctcatctggatggcatccgtgtcagccacgctggtgcccttcaccgccgtgcacctgcagcacaccgacgaggcctgcttctgtttcgcggatgtccgggaggtgcagtggctcgaggtcacgctgggcttcatcgtgcccttcgccatcatcggcctgtgctactccctcattgtccgggtgctggtcagggcgcaccggcaccgtgggctgcggccccggcggcagaaggcgctccgcatgatcctcgcggtggtgctggtcttcttcgtctgctggctgccggagaacgtcttcatcagcgtgcacctcctgcagcggacgcagcctggggccgctccctgcaagcagtctttccgccatgcccaccccctcacgggccacattgtcaacctcgccgccttctccaacagctgcctaaaccccctcatctacagctttctcggggagaccttcagggacaagctgaggctgtacattgagcagaaaacaaatttgccggccctgaaccgcttctgtcacgctgccctgaaggccgtcattccagacagcaccgagcagtcggatgtgaggttcagcagtgccgtgtagacagccttggccgcataggcccagccagggtgtgactcgggagctgcacacacctgggtggacacaaggcacggccacgtcatgtctctaaactgcggtcagatgtggcttctggctcctcggggcctcgcgagggtcacgcttgcctggtcaccctggggctgcttaggaaacctcacgactggtcaccttgcactcttcacacagaattgctacaatcccaaagcgctcgccccgcagggtccaaaggccagcggtgaccagcctgtcacccagctcctccccgccaaccctgcctgccgctgcacctgcctgccgctgcaggaaacatttgacaccgtcgaccaggaaagccacacggagaggccactgtgggtgaagcgcctcagttacacaggaaccctaaagcaaatctgccaccgtgggggaactgacgctggagatgcaaggtgctggtgggtctgagctggacgtcgcggtgtgtcctctgtgcccacggtctgagctagctagcgcaccgccgagttaaagaggagaaggaaaacatgctgctctggtgcacgcctgagcgtcctccatcttccaggatggcagcaatggcgctgtgcggcctcaccaggcccacgaggagcagcagcgctcggcccggagcagcaggaaggcccctctgtggagcgcccgccgtctgctccggggtggttcagtcactgcttgttgacatcaacatggcaattgcactcatgtggactgggaccgtgcgagctgccgtgtgggttagtcgggtgccaggacaatgaaatactccagcacgtgtggctgacgaatttgtttctacagaaataacagctggggacaactgcggtgatgatgtaaaaaccttcccataaaatgtaagaaaagctgatgaggctggtgacgttcagcctttgtcaataaacctgtcatgtgcggatcctt

SEQ ID NO: 896 - DNA, 3346 bp, Homo sapiens
ggcacgagctggctcgcgcgtgccttttcccctcaggttgtggggagagcggaatcctgctccgccgtcgcagcagcagcggcagccccggcagcctcgggcgacagcggcggcgcgcgagcccccgggcggaccgtaccaccgctcgccagcacgcagggggagccgcccgtctcgccgcgcacgcctcggcgaccccgcggggctgaggcgtcgccgcgcccggcagcgtgagcgcagagccggcctcgaccccgagctcggagccccgcgggccgcgcccgccgccggccccacccatccgggtcgaggaggccgaggccatggctgagacggaggagcggagcctggacaacttctttgccaagagggacaagaagaagaagaaggagcggagcaaccgggcggcgagtgccgcgggcgcagcgggcagcgccggcggaagcagtggagccgcgggtgcggcgggcggcggggcgggcgcggggacccggccgggtgacggcgggaccgccagcgcgggggctgcgggcccaggggccgccaccaaggctgtgacgaaggacgaagatgaatggaaagaattggagcaaaaagaggttgattacagcggcctcagggttcaggcaatgcaaataagcagtgaaaaggaagaagacgataatgaaaagagacaagatccaggtgataactgggaagaaggtggaggtggtggtggaggtatggaaaaatcttcaggtccctggaataaaacagctccagtacaagcacctcctgctccagtaattgttacagaaaccccagaaccagcgatgactagtggtgtgtataggcctcctggggccaggttaaccacaacaaggaaaacaccacaaggaccaccagaaatctacagtgatacacagttcccatccctgcagtcaactgccaagcatgtagaaagccggaaggataaagaaatggagaagagctttgaagtagtaagacacaaaaatagaggtagggatgaggtttcaaaaaaccaggcccttaaacttcagctagacaaccaatatgctgtgcttgaaaatcagaaaagcagccactcacaatacaattaaggaatgggctttgctaacccttctgaggtaactagactgcagctaaccaccaccaacagccattcatcatctgatctctgctggatctacagacaccgatgcagaccactcgatttcatgaccggccctattgcactatggaagttaaagtgtcacgactgctctatgcatattggatttaggggaattttcattgttacataaatgtgtgaactagtttcaacagtgttctttcatatttactctgcaaatacaaaaaaccaaaacctgcagccagtggtcatttcaaaatctttttatgttcagatactgagccttcataagggttgactacctcagatttgctgcactcattgtggacttcatgtggatcacaacttctggataagaagattacaactattaagtgtcgatgtgaaccttgcaaccagctctactggattcttatcagaaatcctgcataaaaagtcagccatctgggttctgatctgctgtaaaagatgaagatttaagtgaccttaattaacctgtcctgtgccctacccttaaggaatactctctgtagtaggctgttgttatattagacttcctggaacacaccgctgaaaagaactgatgtgttcagatcatctgtgtagggctgtgatttgtaatttaaactaattgtattctgaggtaaccacaaaataaattcaaccaaactggggtccaccaagtgggggaaggggaagggagagaataatcttgggggtttttttttttggtaatttttttatttggatagtgcttttttgttttgtttttgttctgcattaaggccttttttgctttgacttgaaataagttctttgacagagcatattgcttggttaattaagtaacctaaagtatgcattaggattgtgaaatgtctcgtgagtatgccaatcctgagggtggaaccaaatagcctttgatgaaaagggcagtggattctggaggctctacttcaggtgctgctataatgcctcatctaatcaggactaaattgtgtaggaaactgcagtgggaagaatatgctttctgctcaggctaagagggtcactgatctgtccttagaaattcagagtaacatgagcaaaacctcagctaaaacccatttaagtggcatggattgtgcatgatctttgataagaattcctcatgtacttgtgcctagtttttcaaggtattggctgttctatagatgcagtgattgtcccagctagctctgttaccagccttttggtgtgtctttatgttcatttggagagtcagggcgaaagacaggtgatgtagcacttctgtttttaataattattgcttaaaatacctattaatagttttgggtcatttaaagggacttgaggaagctacccaggattacagaagagtgtccacctaacaagatggtctggcagtttcctagttttgtatctggttcaatagaaatatgtgaaagtggtaatgtcatcatttgatgcagagtccgggtttctctataataaatccctttgccaaatgcatgagttgcagacttgctactggcaagagtgaagcaagtgggtgagtaaaactattttgacgtgggagcgttttcagataggagtttagtcttgacgaaagtgtccgtgcaggaattggactccgaggagggttacagtatctcctgacgggacctgccactcgcatctgggcaatgttgacatttgaggtggcaggcaggatgcctgccttctaatatatttgggtgagtaactgagccagccaagggaaggttgaatgattaaatcagaaatgggattcttggtaaactgaagacttttatttgggaatgaaaaaccttaaaaaaatctcttcatcgttgaactgtgcattttccctgcattttttcccaacaaaattttgttgggggttatgttactgaagaatgaacagatgagtaagtggaggtgttatgtaaaggcatattgtactcgaaatctgaagacctgcagcagatttaaattacaactcttgttataactttttaaaagattgtgaaaatatcaaaatataaatgaatcaagttttaatatactgtatgatgggtggatgaggctgtccattgtaccatttgtttgaattctcaggcatggtttggcagtgcaagaattctgtaacattaacaaattcaataaaaagtaaatatatggaaaaaaaaaaaaaaaaaaaaaaaaaaaaaaaaa

SEQ ID NO: 897 - DNA, 1256 bp, Homo sapiens
aaagataaagcctttcaaatttgaggaagaccttcggtcccgcctccatttcacgtccggcttaccgtcgtttacgacagtgtcaggatcgcgggcttgctttccggtagcgtgggctgacgcctcgctcaatttctcacagggctgcgcaggtttcccccgtctgcgaatggaccactggaggggttcaaaggttcgcgtcccagtacgggaatgagcctctttgatctcttccggggctttttcggctttcctggacctcggagccacagagatcccttttttggagggatgactcgagatgaagatgatgatgaggaagaagaagaagaagggggctcatggggccgtgggaacccaaggttccatagccctcagcacccccctgaggaatttggcttcggcttcagcttcagcccaggaggagggatacgtttccacgataacttcggctttgatgacctagtacgagatttcaatagcatcttcagcgatatgggggcctggaccttgccttcccatcctcctgaacttccaggtcctgagtcagagacacctggtgagagactacgggagggacagacacttcgggactcaatgcttaagtatccagatagtcaccagcccaggatctttgggggggtcttggagagtgatgcaagaagtgaatccccccaaccagcaccagactggggctcccagaggccatttcataggtttgatgatgtatggcctatggacccccatcctagaaccagagaggacaatgatcttgattcccaggtttcccaggagggtcttggcccggttctacagccccagcccaaatcctatttcaagagcatctctgtgaccaagatcactaaaccagatgggatagtggaggagcgccggactgtggtggacagtgagggccggacagagactacagtaacccgacacgaagcagatagcagtcctaggggtgatccagaatcaccaagacctccagccctggatgatgccttttccatcctggacttattcctgggacgttggttccggtcccggtagccttgttaaccctcagaggccttcaagtcctttccacctctcacccattgcccaccattaataagcttagcttctcttgccacctcaggggcttggatatgtggaatagtgaactggggccatgtcagtttgtcactcacccaaactgaccaataaaacctttatttatgcgaaaaaaaaaaaaaaaaaaaaaaaaaaaaaaa

SEQ ID NO: 898 - DNA, 2563 bp, Homo sapiens
agctcgcccaccgcccgccccagcagtggctgcaccatgcacgtgaacggcaaagtggcgctggtgaccggcgcggctcagggcataggcagagcctttgcagaggcgctgctgcttaagggcgccaaggtagcgctggtggattggaatcttgaagcaggtgtacagtgtaaagctgccctggatgagcagtttgaacctcagaagactctgttcatccagtgcgatgtggctgaccagcaacaactgagagacacttttagaaaagttgtagaccactttggaagactggacattttggtcaataatgctggagtgaataatgagaaaaactgggaaaaaactctgcaaattaatttggtttctgttatcagtggaacctatcttggtttggattacatgagtaagcaaaatggaggtgaaggcggcatcattatcaatatgtcatctttagcaggactcatgcccgttgcacagcagccggtttattgtgcttcaaagcatggcatagttggattcacacgctcagcagcgttggctgctaatcttatgaacagtggtgtgagactgaatgccatttgtccaggctttgttaacacagccatccttgaatcaattgaaaaagaagaaaacatgggacaatatatagaatataaggatcatatcaaggatatgattaaatactatggaattttggacccaccattgattgccaatggattgataacactcattgaagatgatgctttaaatggtgctattatgaagatcacaacttctaagggaattcattttcaagactatgatacaactccatttcaagcaaaaacccaatgaacagcttatgtgttagccatagctgaaaataagcacaaatagcttatattcagatcctatcttcatttgaatatagcttttaaatgaaatgttacagtttgaagttttccttcatgcacttggtgataaacgttttctaaatttttagttaagtatatggataaaaagttatgaactattaaaaatgtgatgtggaccaaaggctaggttgtaatcttgatagtctaaaaaatgatcaaaacaaatgattttcaaggaatattcaatattctgcctttcagaaagtgtatttatatctgtgcttcataaatattaatgttcttcagaacatcattttaaaggagatacttgaattgttatttaaatcaaaccagatgtaaaacactcacatacaagttcatactttaaaagaggaaagctacttaacaatgacaaatatttcacaataataatttttacttatataccatctttcaactgaacatttcagttcttccaagagcttcttagagtagtatattttgggggcagtcaaggaataaactacagtgtaaacatatcccagatgaaaactgctgtatggaaaaatgacagaaagtaactgattgacactgttgattcacagttcagcctcctatctgggaaagacatttctttcctctgctcactttaagaacttttaccgactccaaaaatctcaggaattaaacttttaacagttacagcaataaagaatagttagtactccaaaaatattatatttaagatgctcaacaagaaaaaaatgcaaatgtaatatttttttcaaattacttctttattgacttgtccaaatttcaaaagtgcctacccttcaataaaacttttttattctgatctccataaattacttagtcttctatgtatagctatcaaggaaataaaaccaattttgccacagccacaactgtaaatgtttttgtacccatgctgaaactcataacaacacagacataaaaatagctgtgaggttttgctttttttgttgtcagctatcttaagaatcattaaatacacctgctttgggtaaaactctttgcaagcagtaattaacactagtaacagtgaaagcacaagatttccaaatcagtcgttttctcaaaaaaatatcgtacaagtgactcatcctgtctgctaactccagacctcccagcttgaagccaaatctttccatgtgagattgatatggatttcctagaagtactggaatgttgtcatatcttgccctattttaattctgctatagaaaacaattgccttcacttttaaggagtaatttgaatattaataactctggtctagattttcatataatgtattaaagacaaagtagtgaacatcaatgaacatctgatagagataaactgtaatcaggcataagcttgtttgtatgttctggcagtgactaatcagtaaatgatgtcggtttgcccagtatcacttatcttctgtatttttcctctgtcgtgtaaatagtataaccttttcatttatggacaattttttggactagtagccttcaatatacattctgctttgaattaattttttcaaatcaataaattatgtagacatttaaaatcaaatatcaagtagaattgaaaaatgtgagttacataagttaaaaacttactttaaatcttaccttctataggtagctctaaataaattcatatggttatatgat

SEQ ID NO: 899 - DNA, 2620 bp, Homo sapiens
aggccggcggcggcgatggcctcggcagctgtggagagcttcgtgaccaagcaactggacctgctggagctcgagagagacgcggaggtggaggagcgcaggtcctggcaggagaacatctctctgaaagagctccagagccgaggcgtgtgtttgctgaagctgcaggtatccagccagcgcactgggctgtacggacggctgctggtcacctttgagcccaggcgatacgggtccgcggcagctcttcccagtaacagctttacttctggtgatatcgtgggcctgtacgatgctgctaatgagggcagtcagctggccactgggatcttgacccgggtcacccagaagtcggtcacggtggcctttgatgagtcccacgatttccagttgagcttggaccgagagaattcctacagactgttaaaacttgccaatgatgtcacttacaggcgactgaaaaaagccctgattgctctaaagaagtatcattctggcccagcctcctcactcatagaagtgctctttggcagatctgctcccagtcctgccagtgaaatacacccgctgacattcttcaacacctgcctggacacctcccagaaagaagcggtttcatttgcgctgtctcagaaagaacttgccatcatccatggacctcctggcactgggaaaaccacgactgtggttgagatcattcttcaagctgtgaaacaaggcttaaaggttctgtgctgcgccccctccaacatcgccgtggacaatctggtggagcgcctggctctgtgtaagcagcggattctgcgcctgggacaccctgcccgcctcctggagtccattcagcagcactccctggatgcggttttagcgcggagcgacagtgcccagattgttgcagatatcaggaaggacatcgaccaggtctttgtgaaaaacaaaaagacccaggataagagagagaaaagtaattttcgaaatgaaattaagctgttaagaaaagaactgaaggagagggaagaagcagctatgctcgagagcctcacttcggcaaacgtggtccttgcaacaaacacaggtgcgtctgccgatggccccctgaagttgctgcccgagagctacttcgacgtggtggtcattgacgagtgtgcccaggccctcgaggcgagctgctggatccccctgctgaaggccagaaagtgcatcctggcgggcgatcacaagcagctgccccccaccacagtctctcacaaggctgcgctggcaggactgtcactcagcctgatggaacgcctggctgaggagtacggcgcgagggtggtgcggacactgacggtgcagtaccgcatgcaccaggctatcatgcgctgggcctcagacaccatgtaccttgggcagctcacagcccactcttccgtggcaaggcacctcctgagggacctcccaggtgtggctgccacagaagagacgggtgtgcccctgctcttggtggacaccgccggctgcgggctgtttgagctggaggaggaggacgaacagtcgaaagggaaccctggcgaagtccgcctcgtcagtttgcacatccaggctctggtggacgctggtgttccagcccgtgacattgctgtggtctcgccatacaacctccaggtggacctgctcagacagagccttgtgcacaggcaccctgagcttgaaatcaagtctgtcgatggcttccaaggccgagagaaggaggccgtgatactgtccttcgtcagatccaacaggaaaggtgaagttggttttcttgctgaggaccggaggatcaacgtggctgtcacccgtgcccgacgccacgtggcggtcatctgtgactcccgtactgtcaacaaccatgcatttttgaagaccctggtggagtatttcacacagcatggggaagtacgcacggcctttgagtatcttgacgatattgtcccagaaaactattcccatgagaactcccagggttccagccacgctgccaccaagccccagggacctgctgcgtccaccaggaccggaagccagcggcaggagggaggccaggaggctgcagcacctgccagacagggccggaagaagccggctgggaagtctctggcctctgaagctccatctcagcccagcctcaacggaggcagcccagagggagtggagagccaagatggcgtggaccacttccgggccatgatagtggagttcatggccagcaagaagatgcagttggagtttcctccttccctcaattcccacgacaggctgcgggtccaccaaatagccgaggagcacgggctgaggcacgacagttctggggaagggaagaggaggttcatcactgtgagcaagagggccccgcgaccccgagcagccctgggacccccagcagggaccggtggcccagcccctctccagccagtgccccctacccctgcgcagacagagcagcctcccagggagcagcgtggcccagaccagcctgatctgaggacgctgcacctggagagactgcagagggtcaggagcgcgcaggggcagcccgccagcaaggagcagcaggcctcagggcagcagaaacttccagaaaaaaaaaaaaaaaaaa

SEQ ID NO: 900 - DNA, 2235 bp, Homo sapiens
ctccgagtccagggcgagtgcagagcagagcgggcggaggaccccgggcgcgggcgcggacggcacgcggggcatgaacctggagggcggcggccgaggcggagagttcggcatgagcgcggtgagctgcggcaacgggaagctccgccagtggctgatcgaccagatcgacagcggcaagtaccccgggctggtgtgggagaacgaggagaagagcatcttccgcatcccctggaagcacgcgggcaagcaggactacaaccgcgaggaggacgccgcgctcttcaaggcttgggcactgtttaaaggaaagttccgagaaggcatcgacaagccggaccctcccacctggaagacgcgcctgcggtgcgctttgaacaagagcaatgactttgaggaactggttgagcggagccagctggacatctcagacccgtacaaagtgtacaggattgttcctgagggagccaaaaaaggagccaagcagctcaccttggaggacccgcagatgtccatgagccacccctacaccatgacaacgccttacccttcgctcccagcccagcaggttcacaactacatgatgccacccctcgaccgaagctggagggactacgtcccggatcagccacacccggaaatcccgtaccaatgtcccatgacgtttggaccccgcggccaccactggcaaggcccagcttgtgaaaatggttgccaggtgacaggaaccttttatgcttgtgccccacctgagtcccaggctcccggagtccccacagagccaagcataaggtctgccgaagccttggcgttctcagactgccggctgcacatctgcctgtactaccgggaaatcctcgtgaaggagctgaccacgtccagccccgagggctgccggatctcccatggacatacgtatgacgccagcaacctggaccaggtcctgttcccctacccagaggacaatggccagaggaaaaacattgagaagctgctgagccacctggagaggggcgtggtcctctggatggcccccgacgggctctatgcgaaaagactgtgccagagcaggatctactgggacgggcccctggcgctgtgcaacgaccggcccaacaaactggagagagaccagacctgcaagctctttgacacacagcagttcttgtcagagctgcaagcgtttgctcaccacggccgctccctgccaagattccaggtgactctatgctttggagaggagtttccagaccctcagaggcaaagaaagctcatcacagctcacgtagaacctctgctagccagacaactatattattttgctcaacaaaacagtggacatttcctgaggggctacgatttaccagaacacatcagcaatccagaagattaccacagatctatccgccattcctctattcaagaatgaaaaatgtcaagatgagtggttttctttttccttttttttttttttttgatacggagatacggggtcttgctctgtctcccaggctggagtgcagtgacacaatctcagctcactgtgacctccgcctcctgggttcaagagactctcctgcctcagcctccctggtagctgggattacaggtgtgagccactgcacccacccaagacaagtgattttcattgtaaatatttgactttagtgaaagcgtccaattgactgccctcttactgttttgaggaactcagaagtggagatttcagttcagcggttgaggagaattgcggcgagacaagcatggaaaatcagtgacatctgattggcagatgagcttatttcaaaaggaagggtggctttgcatttcttgtgttctatagactgccatcattgatgatcactgtgaaaattgaccaagtgatgtgtttacatttactgaaatgcgctctttaatttgttgtagattaggtcttgctggaagacagagaaaacttgcctttcagtattgacactgactagagtgatgactgcttgtaggtatgtctgtgccatttctcagggaagtaagatgtaaattgaagaagcctcacacgtaaaagaaatgtattaacgtatgtaggagctgcagttcttgtggaagacacttgctgagtgaaggaaatgaatctttgactgaagccgtgcctgtagccttggggaggcccatcccccacctgccagcggtttcctggtgtgggtccctctgctccctctgaaaaaaaaaaaaaaaaaa

SEQ ID NO: 901 - DNA, 4382 bp, Homo sapiens
ctccaacaaattccaaacacacttcactttcgaggaattcaggcgcagctcaaaccccctcagcctgttggcttctgttcaccagctgcaagggtttacatacacggccaccgccatccaaaatgtcgtgcaccgattgttccatgcctcatatggggcccgtagggatgccgccaaaattctcattgtcatcactgatgggaagaaagaaggcgacagcctggattataaggatgtcatccccatggctgatgcagcaggcatcatccgctatgcaattggggtagggcgtgggatggcttcccacttctcccacggcttcctctcagggcaactcccctttctgtgtatgttcttttctctttgagacagggtcttgctctatcacccaggaagtggtgcaatcctagctcactgcagccttgaactcctgggctccagtgatcctcccaccccagcctccccagtagctgggaccacaggtgtgtgccatcaagcctggctattttctttttggttgagatggggtcttgctatgttgcccaggctggtctcaaattcctggccttaagcaattctgccaccttggtctcccaaagcacagggattacaggcgtgaaccaccgccaacaacatccctttcaaggatagaaacaccagctctctcggctcttactgccttaaggatgaaaactctgccccagactggagaccatgatcctttctcctaaactccctgatgctgtccgggcttcgtgtttctcctgtgtccaccgggtgtgatcatgttgatcttgtggggttattggaagatgttgcacccagtgcacacaggcacatttgatttattatttttactgagttgatcttttctggggacaggttggattagcttttcaaaacagaaattcttggaaagaattaaatgacattgcatcgaagccctcccaggaacacatatttaaagtggaggactttgatgctctgaaagatattcaaaaccaactgaaggagaagatctttgccattgagggtacggagaccacaagcagtagctccttcgaattggagatggcacaggagggcttcagcgctgtgttcacacctgatggccccgttctgggggctgtggggagcttcacctggtctggaggtgccttcctgtaccccccaaatatgagccctaccttcatcaacatgtctcaggagaatgtggacatgagggactcttacctgggttactccaccgagctggccctctggaaaggggtgcagagcctggtcctgggggccccccgctaccagcacaccgggaaggctgtcatcttcacccaggtgtccaggcaatggaggatgaaggccgaagtcacggggactcagatcggctcctacttcggggcctccctctgctccgtggacgtagacagcgacggcagcaccgacctggtcctcatcggggccccccattactacgagcagacccgagggggccaggtgtctgtgtgtcccttgcccagggggtggagaaggtggtggtgtgatgctgttctctacggggagcagggccacccctggggtcgctttggggcggctctgacagtgctgggggatgtgaatggggacaagctgacagacgtggtcatcggggccccaggagaggaggagaaccggggtgctgtctacctgtttcacggagtcttgggacccagcatcagcccctcccacagccagagtctcgctctgtcacccagactggagcacagtggtgcaatctccgctcactgcaacctctgcctcccgggttcaagtgattctcctgcctcagcctcctgagcagcttggattgcagcggatcgcgggctcccagctctcctccaggctgcagtattttgggcaggcactgagcgggggtcaagacctcacccaggatggactggtggacctggctgtgggggcccggggccaggtgctcctgctcaggaccagacctgtgctctgggtgggggtgagcatgcagttcatacctgccgagatccccaggtctgcgtttgagtgtcgggagcaggtggtctctgagcagaccctggtacagtccaacatctgcctttacattgacaaacgttctaagaacctgcttgggagccgtgacctccaaagctctgtgaccttggacctggccctcgaccctggccgcctgagtccccgtgccaccttccaggaaacaaagaaccggagtctgagccgagtccgagtcctcgggctgaaggcacactgtgaaaacttcaacctgctgctcccgctaccctttgagaagaactgtggagccgaccatatctgccaggacaatctcggcatctccttcagcttcccaggaaacaagggcagctgcgttccctgcacctgacatgtgacagcgccccagttgggagccagggcacctggagcaccagctgcagaatcaaccacctcatcttccgtggcggcgcccagatcaccttcttggctacctttgacgtctcccccaaggctgtcctgggagaccggctgcttctgacagccaatgtgagcagtgagaacaacactcccaggaccagcaagaccaccttccagctggagctcccggtgaagtatgctgtctacactgtggttagcagccacgaacaattcaccaaatacctcaacttctcagagtctgaggagaaggaaagccatgtggccatgcacagataccaggtcaataacctgggacagagggacctgcctgtcagcatcaacttctgggtgcctgtggagctgaaccaggaggctgtgtggatggatgtggaggtctcccacccccagaacccatcccttcggtgctcctcagagaaaatcgcacccccagcatctgacttcctggcgcacattcagaagaatcccgtgctggactgctccattgctggctgcctgcggttccgctgtgacgtcccctccttcagcgtccaggaggagctggatttcaccctgaagggcaacctcagctttggctgggtccgccagatattgcagaagaaggtgtcggtcgtgagtgtggctgaaattacgttcgacacatccgtgtactcccagcttccaggacaggaggcatttatgagagctcagacgacaacggtgctggagaagtacaaggtccacaaccccacccccctcatcgtaggcagctccattgggggtctgttgctgctggcactcatcacagcggtactgtacaaagttggcttcttcaagcgtcagtacaaggaaatgatggaggaggcaaatggacaaattgccccagaaaacgggacacagacccccagcccgcccagtgagaaatgatcccctctttgccttggacttcttctcccccgcgagttttccccacttacttaccctcacctgtcaggcctgacggggaggaaccactgcaccaccgagagaggctgggatgggcctgcttcctgtctttgggagaaaacgtcttgcttgggaaggggcctttgtcttgtcaaggttccaactggaaacccttaggacagggtccctgctgtgttccccaaaggacttgacttgcaatttctacctagaaatacatggacaatacccccaggcctcagtctcccttctcccatgaggcacgaatgatctttcttttctttcttttttttttttttcttttctttttttttttttttgggacggagtctcgctctgtcacccaggctggagtgcaatggcgtgatctcggctcactgcaacctccgcctcccgggttcaagtaattctgctgtctcagcctcctgagtagctgggactacaggcacacgccacctcgcccggcccgatctttctaaaatacagttctgaatatgctgctcatccccacctgtcttcaacagctccccattaccctcaggacaatgtctgaactctccagcttcgcgtgagaagtccccttccatcccagagggtgggcttcagggcgcacagcatgagaggctctgtgcccccatcaccctcgtttccagtgaattagtgtcatgtcagcatcagctcagggcttcatcgtggggctctcagttccgatttcccaggctgaattgggagtgagatgcctgcatgctgggttctgcacagctggcctcccgcgttgggcaacattgctggctggaagggaggagcgccctctagggagggacatggccccggtgcggctgcagctcacccagccccaggggcagaagagacccaaccacttctattttttgaggctatgaatatagtacctggaaaaatgccaagacatgattatttttttaaaaagcgtactttaaatgtttgtgttaataaattaaaacatgcac

SEQ ID NO: 902 - DNA, 3032 bp, Homo sapiens
tttaaatacataagtttaaaagagaattaactttcaatttgcaaattaaaatgagaatggttgccttttcttcattatcaagagatggtgagttgtcctcctgttgcatcataaatacaaaggactgaagttataaaagagaaaagagaagtttgctgctaaaatgaatctgagcaatatggaatattttgtgccacacacaaaaaggtactgaagatttaccccccaaaaaaaattgtcaatgagaaataaagctaactgatatcaaaaagcagagcctgctctactggccatcatgcgtaaaggggtgctgaaggacccagagattgccgatctattctacaaagatgatcctgaggaactttttattggtttgcatgaaattggacatggaagttttggagcagtttattttgctacaaatgctcacaccagtgaggtggtggcaattaagaagatgtcctatagtgggaagcagacccatgagaaatggcaagatattcttaaggaagttaaatttttacgacaattgaagcatcctaatactattgagtacaaaggctgttacttgaaagaacacactgcttggttggtgatggaatattgcttaggctcagcctctgatttattagaagttcataaaaaaccacttcaggaagtggagatcgctgccattactcatggagccttgcatggactagcctacctacattctcatgcattgattcatagggatattaaagcaggaaatattcttctaacagagccaggtcaggtaaaactagctgattttggatctgcttcaatggcttctcctgccaactccttcgtgggcacaccttactggatggctccagaggtgatcttagctatggatgaaggacagtatgatgggaaagttgatatttggtcacttggcatcacttgtattgaattggcggaacggaagccgccccttttcaacatgaatgcaatgagtgccttatatcacattgcccagaatgactccccaacgttacagtctaatgaatggacagactcctttaggagatttgttgattactgcttgcagaaaatacctcaggaaaggccaacatcagcagaactattaaggcatgactttgttcgacgagaccggccactacgtgtcctcattgacctcatacagaggacaaaagatgcagttcgtgagctagataacctacagtaccgaaaaatgaaaaaaatacttttccaagagacacggaatggacccttgaatgagtcacaggaggatgaggaagacagtgaacatggaaccagcctgaacagggaaatggacagcctgggcagcaaccattccattccaagcatgtccgtgagcacaggcagccagagcagcagtgtgaacagcatgcaggaagtcatggacgagagcagttccgaacttgtcatgatgcacgatgacgaaagcacaatcaattccagctcctccgtcgtgcataagaaagatcatgtattcataagggatgaggcgggccacggcgatcccaggcctgagccgcggcctacccagtcagttcagagccaggccctccactaccggaacagagagcgctttgccacgatcaaatcagcatctttggttacacgacagatccatgagcatgagcaggagaacgagttgcgggaacagatgtcaggttataagcggatgcggcgccagcaccagaagcagctgatcgccctggagaacaagctgaaggctgagatggacgagcaccgcctcaagctacagaaggaggtggagacgcatgccaacaactcgtccatcgagctggagaagctggccaagaagcaagtggctatcatagaaaaggaggcaaaggtagctgcagcagatgagaagaagttccagcaacagatcttggcccagcagaagaaagatttgacaactttcttagaaagtcagaagaagcagtataagatttgtaaggaaaaaataaaagaggaaatgaatgaggaccatagcacacccaagaaagagaagcaagagcggatctccaaacataaagagaacttgcagcacacacaggctgaagaggaagcccaccttctcactcaacagagactgtactacgacaaaaattgtcgtttcttcaagcggaaaataatgatcaagcggcacgaggtggagcagcagaacattcgggaggaactaaataaaaagaggacccagaaggagatggagcatgccatgctaatccggcacgacgagtccacccgagagctagagtacaggcagctgcacacgttacagaagctacgcatggatctgatccgtttacagcaccagacggaactggaaaaccagctggagtacaataagaggcgagaaagagaactgcacagaaagcatgtcatggaacttcggcaacagccaaaaaacttaaaggccatggaaatgcaaattaaaaaacagtttcaggacacttgcaaagtacagaccaaacagtataaagcactcaagaatcaccagttggaagttactccaaagaatgagcacaaaacaatcttaaagacactgaaagatgagcagacaagaaaacttgccattttggcagagcagtatgaacagagtataaatgaaatgatggcctctcaagcgttacggctagatgaggctcaagaagcagaatgccaggccttgaggctacagctccagcaggaaatggagctgctcaacgcctaccagagcaaaatcaagatgcaaacagaggcacaacatgaacgtgagctccagaagctagagcagagagtgtctctgcgcagagcacaccttgagcagaagattgaagaggagctggctgcccttcagaaggaacgcagcgagagaataaagaacctattggaaaggcaagagcgagagattgaaacttttgacatggagagcctcagaatgggatttgggaatttggttacattagattttcctaaggaggactacagatgagattaaattttttgccatttacaaaaaaaaaaaaaaaaaa

SEQ ID NO: 903 - DNA, 10568 bp, Homo sapiens
ttaaaaaaaaacataccgttaatttaaatttctaacctttagcagtttctgagtgctttcacaaacctgacctcatttaatccccacatactccagtgaggtagatatggctaatgtatccagtttacagaagaggagaaacagggtgaagtaacttgcctaaaatcataccaagtgggagaagaccaaacctggccttctaattctaaatcccaggagtactccatctttcgggaaaaaaatcccaccccagcacaaagcctatgaaatgctatacaaatatgtgattactactttggggcaaggatgaataagcccaaagaagcatcatgcctgacgctgagttggctggccggtgaaggcgtctgtcccttcccttggtatccctatgacttacctgttggacaggtagggggaaggggagagtaatgagtctcacctgctcagagcaagggtggggcaagacacaccccatcccttccattggttttttccttagtcttactgacagagccttgtccaatcaggaggaagtaactttctatctgccaatagatgcaatgttaggatgagacctcaagttagagtccatccctagagccgactggcagtccccggggccaatggcaagcggataaacagaggcggccgtggaagaggactggaggcgaggctccgcccctccacgggacagtcaggcgagatagccagtgagctcgcaccagagggtgggcgtctcccccaggggcggagcttcgaggtggcgaggggcgtggcttggctgtcaggtctcttcgccttttgttcggttactgagttgctgccttggccagagtccggagcagccgccgcccgaccgcgccgagctcagttcgctgtccgcgccggctcccaccccggcccgaccccgacccggcccggtcaggccccatactcagtagccacgatggaggtgatgaacctgatggagcagcctatcaaggtgactgagtggcagcagacatacacctacgactcgggtatccactcgggcgccaacacctgcgtgccctccgtcagcagcaagggcatcatggaggaggatgaggcctgcgggcgccagtacacgctcaagaaaaccaccacttacacccagggggtgccccccagccaaggtcaggacccctggggactattgcatggggcagaaaacctgcctgggtcctggagagaggtcagagtgaaaggaggcagattgtagggggtctctggtctgagggaggaggcacagctcatgctaactaggggcccacccagtctgaaggaggaggtgcagctacttcagggtgctgcatctgggagggtcacagaatcctcttctgtgaaccatcagtagggagggaaggcatagtccctgcccttagggtgcctccagtctgaaggaaaagccatagtccttgccttctgtgaacataagaatctgatgaagacattgggtacggtggctcatgcctgtaatcccagcactttgggaggctgaggtgggcagatcacctgaggtcaggagtttgagaccagcctggccaacatgatgaaaccccgtctctactaaaaatacaaaaattagccgggtgtggtggcgcatgcacctgtagtcccagctacttgggaggctgaggcaggagaattgcttgaacccaggaggcagaggttggagtgagctgagattgcgccactgcactccagcctgggcgacagagtgagactccgtctcaaaaaatagtaaaaaaaagagtctgatgaggatgtatactatggctctcagggagcccatggatggcagggaggacgcagccctttggctgcaggagcctcacgtttgtgggagagccagggccgtagcccccaggaacccccagggattcccctttgggtagaggggtgtaggtgtcaagcctgagggcccctcgttggggttggagggagaccaggcctctgcggctgacctgcagataggccaaggctgtgggatgagtgactgactcagctctggggcttagtccgggatggggatgccccgccagcccaagcctcccctgcccctctgggagagaggaatagccaggccctagaactgttggccacaggtgcctccagggccctgaacatgccagggggtgggctgtgggtgctgggagtagtgtgagtagactgtggctggtggggctctatggagctcagccctcgcatgccagtctcctccctgacagctggtaggggtagcagggggccttttggctggcagggccaggcactgtgttggtagcaaaaagtacagcatccaggtgggaaagccatgcagctgtctcctccttctcgactaattagagggtggaacctctgcgtccctctccctgggggcatcaggacagttgccagggtgtggctgcttgggcacctacctgtgggactcccagacccacccaggggatggaagctagagaggaacctgacgtctcagctgaggacccagctcctgctctctgaacccacagccctgactttccctctgatctgctgtgagatgtgatgttggtggttctctgggcctctgtttgcctgcctgtatagtgggaggattgctaccgttggggatgatgagggtgtaattagactcctgagatttcagggttgaaaacagacctgatgggtaagggaggagaatagagtaggggtttgggcccctgagtcaggctgccttataacccctctgtgcccagttttcccatctgtaaagtggagccagtgatagtacttaccttgcagggtcgttgtcaggttatgtgagaaaatataagcagggcattgaattcactgccaggcacataataagtgtgccaaaaaaaaaaaaaaaattcccgtgatagacagaacatgtggggcctattttacagagattactgaggtgatggtgacttccccaaggttcctggtgagaggtagaatggccagtcatgtgctgggggtttgggcagggcaagaggtagcccagaggacccaggtggggctgtctgtggcctgccctgctccccagtgtctgcccagcccactgcctgcactcagtccctgtccccatggcccccaggtgacctggagtaccagatgtccacaacagccagggccaaacgggtgcgggaggccatgtgccctggtgtgtcaggcgaggacagctcgcttctgctggccacccaggtggaggggcaggccaccaacctgcagcgactggccgagccgtcccagctgctcaagtcggccattgtgcatctcatcaactaccaggacgatgccgagctggccactcgcgccctgcccgagctcaccaaactgctcaacgacgaggacccggtctgtgagggtccctgctagggtgggggctgggcagggaggggagagagcagatgtcctcaggggagggacattgtaggggtggagggaggttatgacccagactctcccgtgtgtgatgagtctgactggggccctcctcagctctgtggaagggtatcccggcctctccttagtgctcacgtccccgcccctgcctttgccctccaggtggtggtgaccaaggcggccatgattgtgaaccagctgtcgaagaaggaggcgtcgcggcgggccctgatgggctcgccccagctggtggccgctgtcgtgcgtaccatgcagaataccagcgacctggacacagcccgctgcaccaccagcatcctgcacaacctctcccaccaccgggaggggctgctcgccatcttcaagtcgggtggcatccctgctctggtccgcatgctcaggtacccaccctgctcactgcatgagcccaggaccccctctcacttgggcctctcccctcccttccctgagcttccataaatatccagtgagcacctactatgtgccaggcagaagcacaccccatccgggtgctcggtggctcacagcccagcagggaacacaggcatgtaaacagcaggttaatgatcaggatacgacacaggctatggcagaagagcattgagattgctcaaaggtggaatcgcttaatggcaggggattgacagatgagtggagtttggctagtgtagaggaagggaagagtgtcccaggcagagggaacagcaaatgcaaagtcccttgcaaactttctgtttcctggccccctacaaaatgtggattggcctcatttctttttttttttttgagatgaggccttgctctgtcacccaagctggagtgcagtggcgtgatctcagctcactgcagcctccacctcctgggttcgaatgattctcctgcctcagtctcctgagtagctgggattacaagcatctgccaccatacctagctatttttttttttgttttgagatggagttttcctcctgttgcccaggctggagtgcaatggcacagtctcggcttactgcaacctctgcctcccgggttcaagagattctcctgcctcagcctcccaagtagcagggattacaggcacccacgaccatgcctggctaatttttgtatttttagtaaaaatggggtttcaccatgttggccaggctagtcttgaactcctgacctcaggtgatctgccccccttggcctcccaaagtgctgggattataggcgtctgccaccatgcccagctcaattttgtatttttagtagagacggggtttcaccacgttggccaggctggtttcgaactcctaacctcagggtgatccacctgcctcagcctccccaagcgctgagtttacagacgtgagccactgctcctggccttatttctcatccccataccaggctggaagctccctgaaggggagactgatttcactcccctctgaacgccttgcaaggcctctctaatatgtggccttccacatggtggttacttagtagggatcagtgtctaggggacctactgtgcgctcagcacagggctggggactcagaagcaggaggagtcattgtcccagttgggagaagagaggtgctgtttgcttcatgcttaagagcagggcaggctcaaggagtgatgagattttagcgaagggatatttccagaggggcgtcagtagcggggaggcttcctgggggaggtgggaacccatgccaggctcacatgtatgccaggcctctgggacctcagcgtactaacccctgcccacccccccagctcccctgtggagtcggtcctgttctatgccatcaccacgctgcacaacctgctcctgtaccaggagggcgccaagatggccgtgcgcctggccgacgggctgcaaaagatggtgcccctgctcaacaagaacaaccccaagttcctggccatcaccaccgactgcctgcagctcctggcctacggcaaccaggagagcaaggtgggccctccccaaccctcccgaggcctgaagcccacccttgcgccatcttctatcctgcacagccttgggccgctgcccccttactccttttagatgagatataggtgcagatatacatgcttcatcatgcgactgaattgcccagaattattattttgaggataagggaaaaaaaaaatcactcatcctcatatagccactattgtcattcgatgtgcttccttaagagctgttctgtgggcagattacagatgtgtacacatccttgtcatcataacaatctgcaatattgcatctgtttctgcctgattttttttttttttttttgaaacagggtctaactttgtcacacaggctagagtgcagtggtgtaatcagggctcactgcagccttgacttcctgggctcagatgatcctcctacctcagcctccagagtagctgggacttcaggcgtgtgctaccacgcccgactaattttttttttccttttcttttctttcttttttttttttgtttgagatggagtctcactttgtcacccaggcaggagtgcaatggcacgatctcggctcactgcaaccttcgcctcccgggttcaagcgattctcctgcttcagcctcccaagtagctaggattacaggtgcccgccaccacacccagctaatttttgtatttttagtagagacaaggtttcaccacattggccaggctggtctcgaactcctgaccttaggttgtccatctgcctcggcctaataaaatgctgggattacaggcatgagacaccgtgccccacccccaactaattttttatagagatgggatttctccatgttgcccaggctggtctcaaactcctgggctcaagtgatctgcctgccttggcctcccaaagtatcaggattacaggtgtgagccactgtgcctggcctgtatgatgtttaaaaaaaatttttttttgctatattgtcctcaaaaccaccctctaataatgacagattgcctttcctttcccttttccccctcccctttcctttttccttttccttttccttttcctttccctctcttcctctctttcttctttccttcccattctttccttttctttcttttttgagacagggtctcactgtgttacccaggctagagtgcagtggcatgatcctagctcactgcatcctcaaactcctgagctcaagcattcgtcccatcttagtcttcctgatagctaggactatgagaacatactactgagctaattagcacccgggctaagttttaaattttttgtggggatggtgtcttgctctgttgcccaggctaccctcaaggaatcctcctgcttcagcctccgaaatgctgggattaaagtcatgggccaccatacccagcctacagatagcatttcattaagtggagacctcaggctttattctgagggagggtatttagattgctcctattccacctttataaacaatgctgtaatgaatgtctagcctttgtcaaagagcggaaaaaattctcatcaatttttaacacttctaggcttttccccaaatggccagattgatttccagaaggattggactaatttccagtgccataactggtaatgggtgtgcatatagttttgtcatgtccttgtcagcactgggtattatccttttttcaaaattttggcttacataacagtcatgaaactattggggtgggctgggtgtggtggttcacgcctgtaatcccagcactttgggaggcagaggcgggtgaattgcctgaggtcaggagtttgaaaccagcctggccaacatagtgaaaccctgtctctaccaaaaactacagaaattagccgggcgtgatggcacacgcctgtaatcccagctacttgggaggctgaggcatgagaattgcttgaacccgggaggcggaggttgtagtgacctgagatcgtgccactgcactccagcctgggtgacagagcgagactctatctcaaaaaaaaaaacaaaaaaacttattggggtgcttggctgggtgtggtggctcacatctgtaatcccagcactttgggaggctgaggtgtgaggatcacttgaggccaggagttctagaccagcctgggcagcatagtgagacccccatctttataaaaagaaaaaaatacattaaaagaaaaaaacgaactattcgtgctttagctgaagctcagtaatgacagttctgtctcctgtcccgcgcttccttgttcctgtcatattccccgtccatctcacactcattccctctttacccatagctgatcatcctggccaatggtgggccccaggccctcgtgcagatcatgcgtaactacagttatgaaaagctgctctggaccaccagtcgtgtgctcaaggtgctatccgtgtgtcccagcaataagcctgccattgtggaggctggtgagtatgatggccttgagggcggctggggtgggagctctgcccagctgccaggctcagtcagccatgctccccgtggctgatggcacccctatccctgccccaggtgggatgcaggccctgggcaagcacctgaccagcaacagcccccgcctggtgcagaactgcctgtggaccctgcgcaacctctcagatgtggccaccaagcaggtgagggaggtatctgggcctggggttgacctcttcagctgccccatccagcctcctgtctgggcatctgacctgaggtactgtgggaggactgggggctctaaatctctcttccttgtgactgaggctggaaatgccttgaaaaccctcatctctttttttttttttttttttttttttcctgacggagtctcactctgtcacctaggctggagtgcagtggtgcaatctcggctcactgcaagctccgcctcctgggctcaagtgattctcctgcctcagcctcccgagtagttgggactacaggcacctgccatcatgtctggctaatttttgtatttttatggagacagggtttcaccatgttgggcaggctggtcttgaactcctgacctcaggtgatccacccgccttggcctcccaaagtgctgggattacaggcgtgagccaccacatccagcaaaagaacagttttgacctgggccctgggctggagcaatagtgtaccaagagacaggcccccatgactaaaaatacaatttaaggaaaaatgcagctccagggcaagtgccctgtgcctccttccaacaaccattccccaggcctcccctagcaatatgctgtttatcaagtgctcaccctgtgctggccctctgcgtggcatttgtggacagtagctcattcaacctggggttagagtgtgggaccccgtgggttagatgaagacactgaggctcggggagctaatggccatggtcacaggtagtaaatggcagaactgggatttgaacccaggactgtccgtccccaaagctggggtttttctgttccaccacaaggcccacgtgtctccctgggagaagtgagatagacgtctgaggtagtgattttactggaaatggatttggctcagggccccagggtggtggggcagcagtgaaggcccagaaaggtgacaagcgagtagacatggctcagctgggccactgaatcatgcggccccctcaacaattgcctcctggtctcgaggcctcccttggccaccgtactttggcctgaggagggttctgcctgggtctgagggccccagggaaaggctgatgagttggagggaagagatgtggggcttagagccaagcctgggttcagatccagccactagctgtgtgtctgtgggcaagttccccaacctctctgagcctcattgcctcacttgcaccacaggatagtaacgccctctcacagggtgtggcgggtcatagggatgaaagttcccgggcacacacaggcagggctgacccctttaggtcatcccactccccttggacatattcgagaaggctccctggagttggctgctccctgactcccccgtcccttccttgccctccaggagggcctggagagtgtgctgaagattctggtgaatcagctgagtgtggatgacgtcaacgtcctcacctgtgccacgggcacactctccaacctgacatgcaacaacagcaagaacaagacgctggtgacacagaacagcggtgtggaggctctcatccatgccatcctgcgtgctggtgacaaggacgacatcacggagcctgccgtctgcgctctgcgccacctcactagccgccaccctgaggccgagatggcccagaactctgtgcgtctcaactatggcatcccagccatcgtgaagctgctcaaccagcccaaccagtggccactggtcaaggtactgctgttaggcgaggggaggagctccctgcagcaggcttaggtgctgtattggtataggcaaagccgctgtagcaaagaagccctaaatacagtggctcgaataagacagaagtttatttctctctcgtgtaatagtttagacctcaacaatggctctgctctaaaattccagaattgggatttctatcttgtagctctaccagcccctagggcagagctcagagttcaaaatgcacatgagtaccctgggtggtttcattaaattgcaggttccagggccaggcacggtggctcatgcctgtaatcccaacactttgggaggcaaaggtaggaggattgcttgaggccaggaatttgagaccagtctggacaacatagcaagacctgtctcgacaacaataacaacaacagaaattagccaggtgtggtggtgcacgcctgtggtcccagctactggggaggggaggctcaggttggaggatcgcttgagcacaggagttggaggttacagtgagctatgattgcatcagtgcactccagcctgggtgacagagcaagaacccgtgtcttaaaagaaaagaaaaacaggaggctgggtgcagtggctcacatctgtagttccagcactttgggaggtgcaggcagaggcggaagcggaaggatcacttgaggccaggagtttgagaccatcatgggtaacatagtgagacacccatctcttacaaaaaatttggaaaaaaaaaaaa

SEQ ID NO: 904 - DNA, 4943 bp, Homo sapiens
attgataagggtccgtgtcgactttgaggtcaggacagaaatactgaatgactttacacttaggaaaaaatagctaaataattaagatgcaggctgtagtgttcaaaccaatagagcagggaaagggaaatgtagatactttattaattcagtggaagataggaaagttagaagcaaaggaggctgggcacagtggctcatgcctgtaatcctagcactttgggaggccaagacaggtggatcacctgaggttaggggtttcaccatgttggccaggatggtcttgatctcctaacctcttgatctgccctccttggcctcccaaagtgctgcgattacaggcgtgagccaccgcactggcctaatttctcttttctctgcattgaactagaaaaacatcgttctctttttcgtaatgttccatagttacaaaagctataacataaggtctttttcttcattatgttttctgacatatctgaaaataagcagtgatcccaggtagataatcatattaaccataagagaccaacgtttgtgatatttattacatgcttttttcagagatggaaaataatgtcctgcaagatgaggattgaacagttaaaacaaacaatatgtaaaggaaatgaagaaatggagaaaaattctgaaggccttctcaaaaccaaggaaaagaatcagaagctttacagtcgagcacaacggcaccaagagaaaaaggagaagattcagaggcataatcgcaaacttggtgacctggtagaaaaaaagaccattgacttaagaagtcattatgagcgtctggcaaatcttcgacgatcccatatattagagctcacctctgtcatttttccaatcgaggaagtaaagacgggtgtgagagaccccgcagatgtgtcttcagagagtgacagtgccatgacctccagcactgtgagcaagcttgctgaagcccggaggacaacttacctctcaggacgatgggtctgtgacgatcacaacggagacaccagcattagcattacagggccttggattagcctccctaacaatggggactactctgcctactacagctgggtggaggagaagaaaacaacccaggggcctgacatggagcagagtaaccctgcctacaccatcagtgctgcgctgtgctatgcaactcagctggtcaacattctgtctcatatacttgatgtaaatcttcccaaaaagctctgcaacagtgaattttgtggcgaaaatctaagcaagcagaaatttactcgagcagtgaagaaactgaatgcaaatattctttacctttgtttttctcagcatgtaaatttagatcaattacaaccactgcataccctcaggaatctaatgtacctggtcagtccaagctctgaacacctaggcaggtcagggccctttgaagtacgagcagaccttgaggagtccatggaatttgtggatcccggagttgctggagaatcagatgagagcggagatgagcgcgtcagcgatgaagaaaccgacctgggcacagactgggagaacttgcctagtccccggttttgtgatatcccttcccagtctgtggaagtctcccagagtcagagcacccaggcgtccccacccatcgcgagcagcagtgcaggtgggatgatctcctctgcagcagcctcggtgacctcctggtttaaagcttacactggacaccgttaacgagcatggaccaaaacataccaaatctgcatcaagaaagttcttctcccactacactctagtaaacattttctgtttaagttaagatagtgtctggaacaaagaggttaaagtgttgttttgttttgtctttttaagcagggagacaaacatttctatttgccaagtggcctgtgatggtgaccaacatgcttatgataattaagagaacaggggtcgaaggtctttctacccagaccagtgctggtggaaggaggacctgtgcgtgtggccagttctgccaaggaagcagttgatttgggttccctctgggcccgggccaccgggcccacagatatgggtcagtgtgctggtccttgcggtgctgagactgttcctgacactttaagttttagaggttggttgaatcacaagaggtgattcttgattattaggacatgaaagataaaagctctttaataagagtttttctgccattgttttttgtatgagaaccagcaggcaatttaaaatttctaatttggtcctttgattttgtttgggaggggtgagttacacgtattttattcatgctgctctgtcgtagtttgtcagacattcctgtttttctttcccccacacaccaaagaaaatgaaagtctttttctttaggacccacatccataaatggaagaaatcctggctgcaataatgtctagagagtttttaactattttcttgtattctgaggggaattaagcttattcttacctagttgaattcctgccatccacactatgagcattttgaaattgaacttatattttctgggtgaaaataagtcatgaaggtcattcccttatgtaagctcaatgcctgcctgggcacaggggaaaagccacttagttaagtggcctctggtcattcttgtggtgtccactttctttctatgggattgagtaggtggcaggtgttttcaggggaaaccatcctacttgtttccccgaactctttgttgctctgaggacacagctttgctcagaaatgcagcgcagatccttacggctgatgctactctgctctgttctggggaaagcacaatataaagaaagaatttcccagccgggcgcggtggctcacgcctgtaatcccggcactttgggaggccgaggcaggcggatcacttgaggtcaggagtttgagagcagcctggctaacatggtgaaaccctgtttctgctagaagtgcagaaaattaccgggtgtggtggcgcacgcctgtaatcccagctactcgggaggctgcggcgggagaatcgcttgaaccgggaggcggaggttgcagtgagccgagattgtgccattgcactccagcctgggcaacaagagcgaggctccgtctcaaaaaaaaaaagaatttccctcagcaggagatcattttcagctcacgtgtcttgtcattcttttagtgacaatcttacaagaaaactataatgagagaggcattatgtacaaatatgtaagtagtttatttttaataactgcaaaaatatcctatgtaacaactaccaaaagaaatcctatgaaagagtcctaacaggcattattaccatatcttatgtgattggcatgatagcacctctgataaatcattcagaggtttgccatgccccagcttcttttctcatcataataattgtagttgatactttgcctccaagtccgaggtgctatatagcttttgctaatggtatatttggtgttttgtatagttttgggtagagttgcagaacggagtttatttctatccggtagtcacaaattccttggctctatgaattttccatgaaaggaggaagtaggcttttctcgttgtgggtggtcttttttttttttggagacggagtctcgctcagctgcccaggctggagtgtggtggcgccatctccgctcgctgcaaccaccatctcctgggttcaggcgattcttccgtctcagcctcccgagtagctgggattataggcacctgccatcatgcccagctaatttttgtattttggtagagacgggggttttcaccatgttggccaggctggtcttgaactcctggcttcgggtgatccgcttgccttggcctcctagggtgctgggattgcaggcctgagccaccgcgcccggccccttatgggttcttctacactgctgggatctctgttttaagtgctcagcttcatgattgattgctgggcttccattttcccatccagttctggagttcgtagagagtgaagatggtagacttgaacagataaataaacttaacgatcttgtaagagttgtctagctacttaaaaccctcagaagtaagagcttagtctcacgagttgtaagagtgggatttggagcttggtggtggagactgacttcagctgagagatgcacaacagtcatggttttcttaagcctcttatgaaaccatgaatgagagatgaagctaaagaatagaatccagagatcacaaactcatctagagtacttccacaaaatttacaaagatgtgggaactttatggataggatatattttgtttgttgttgttaatatcaactagaggcactttacatagggttaagtgatcgaacccttttgtggttttgaacaccaacatactggcttacactgctgaaatattttgggtttcattattttgcactggatccaccctgtaaatactcttaagtatacatttcaaccactgttttttctactctttttgctgctcattaaaatctttcatgtaggtgccagaaccatatgtaaacagctttttaaaaaattgaagctggtattttgtttaaacaaaaagccatagaacttggtcatgttttccattttaaaatgatttactgaaacaaagtaatactaataaaaacccacaggcaccaaacaggctgcttaaaatggtctgttaaagacattttttggttatggaatataagaaaagttttgcacatctgtaagggggaaaaacagtatatcaccattgggtagagtggacgggactcatgtaaggactcaatttggggaagagcattcagtggcatgctgttagaggactagtgtccgagaatctcctcacagtatcatgttgcaggaattccccattgctctgcaacttccaaaccagtttgagtcatacaaatgttttctaaacttttattgtattactgcaataaatcttttaacagt

SEQ ID NO: 905 - DNA, 1811 bp, Homo sapiens
acgacgcgctcaaccagatcgcgcgggaggcggaagcccggctcgctgcaaaacgggcggcccgcgcggaggctcgcgagatccgcatgaaggagctggagcggcagcagaaggagatctatcaggtccaaaagaaatattatgggctggatacaaaatggggtgacatcgagcagtggatggaagacagtgagcgctactctcgtagatccagaagaaacacatcggcttctgatgaagacgagcgcatgtcagtgggtagtcgtggaagcctgaggtcgcagcctgacttggagtatgggggtccttacgcctggacaaatggttatgatggagaattgtatggatcacagtccctgaatagaagatctggcaggccctcctgtctgtacagcgctgcccggccttcggggagttaccgggcgtctgtgttggatgaaggcagcttcggtgggacccgacggggcagcacctccggctcccgtgctccctcggagtacagcggccacctcaactccagctcccgcgcctcctccagggccagctcggcccgggccagccctgtggtagaagagagaccagaaaaagattttactgagaaggggtctcgtaacatgccgggcctgtctgcagccacgctggcctctctgggtgggacttcctctcggagaggcagcggagacacctccatctccatcgacaccgaggcatccatcagggaaatcaaggaactcaatgagttaaaggaccagattcaggatgtagaaggcaaatacatgcagggattgaaagagatgaaggactctctagcagaagttgaagagaaatataagaaggctatggtttccaatgctcagctagacaatgaaaagacaaacttcatgtaccaggttgataccctaaaagatatgttgctggagcttgaagaacagctggctgaatctaggcggcagtacgaagagaaaaacaaagaatttgaaagggaaaaacacgcccacagtatactgcaatttcagtttgctgaagtcaaggaggccctgaagcaaagagaggaaatgctcgaggaaatccgacagctacagcagaaacaggcgagttctatcagggagatttctgatcttcaggaaacaatagagtggaaagacaaaaagataggggcattagagaggcagaaagagttctttgattccgtaaggagtgaacgggatgatcttagagaagaagtagtcatgctgaaagaggaattaaagaaacatggaataatcctaaattcagaaatagctaccaatggagagacttccgacaccctcaataatgttggataccaaggtcctaccaagatgacaaaagaagagttaaatgccctcaagtcgacaggggatgggaccctagatattaggttgaaaaagctggttgatgaacgggaatgcttattggaacagattaagaaactcaaagggcagctggaggagagacagaagattggcaaactagacaatcttcgatctgaagatgatgtcttggaaaacgggacagacatgcatgtaatggacctacaaagggatgccaacagacagatcagcgacctcaaatttaaacttgcaaaatctgagcaagagataactgcattagaacaaaatgtaataaggttagagagtcaagtatcacgttacaaatcagcggctgaaaatgcagaaaaaatagaagatgaacttaaggcagaaaaacggaaactccaaagagagctccgctctgcattggataaaacagaagagctcgaggtgagcaacggccacttagtgaagcgtctg

SEQ ID NO: 906 - DNA, 3111 bp, Homo sapiens
ggcacgagcggagagccgcgcagggcgcgggccgcgcggggtggggcagccggagcgcaggcccccgatccccggcgggcgcccccgggcccccgcgcgcgccccggcctccgggagactggcgcatgccacggagcgcccctcgggccgccgccgctcctgcccgggcccctgctgctgctgctgtcgcctgcgcctgctgccccaactcggcgcccgacttcttcatggtgtgcggaggtcatgttcgctccttagcaggcaaacgacttttctcctcgcctcctcgccccgcatgttcaggaccaaacgatctgcgctcgtccggcgtctctggaggagccgtgcgcccggcggcgaggacgaggaggagggcgcagggggaggtggaggaggaggcgagctgcggggagaaggggcgacggacagccgagcgcatggggccggtggcggcggcccgggcagggctggatgctgcctgggcaaggcggtgcgaggtgccaaaggtcaccaccatccccacccgccagccgcgggcgccggcgcggccgggggcgccgaggcggatctgaaggcgctcacgcactcggtgctcaagaaactgaaggagcggcagctggagctgctgctccaggccgtggagtcccgcggcgggacgcgcaccgcgtgcctcctgctgcccggccgcctggactgcaggctgggcccgggggcgcccgccggcgcgcagcctgcgcagccgccctcgtcctactcgctccccctcctgctgtgcaaagtgttcaggtggccggatctcaggcattcctcggaagtcaagaggctgtgttgctgtgaatcttacgggaagatcaaccccgagctggtgtgctgcaacccccatcaccttagccgactctgcgaactagagtctcccccccctccttactccagatacccgatggattttctcaaaccaactgcagactgtccagatgctgtgccttcctccgctgaaacagggggaacgaattatctggcccctggggggctttcagattcccaacttcttctggagcctggggatcggtcacactggtgcgtggtggcatactgggaggagaagacgagagtggggaggctctactgtgtccaggagccctctctggatatcttctatgatctacctcaggggaatggcttttgcctcggacagctcaattcggacaacaagagtcagctggtgcagaaggtgcggagcaaaatcggctgcggcatccagctgacgcgggaggtggatggtgtgtgggtgtacaaccgcagcagttaccccatcttcatcaagtccgccacactggacaacccggactccaggacgctgttggtacacaaggtgttccccggtttctccatcaaggctttcgactacgagaaggcgtacagcctgcagcggcccaatgaccacgagtttatgcagcagccgtggacgggctttaccgtgcagatcagctttgtgaagggctggggtcagtgctacacccgccagttcatcagcagctgcccgtgctggctagaggtcatcttcaacagccggtagccgcgtgcggaggggacagagcgtgagctgagcaggccacacttcaaactactttgctgctaatattttcctcctgagtgcttgcttttcatgcaaactctttggtcgttttttttttgtttgttggttggttttcttcttctcgtcctcgtttgtgttctgttttgtttcgctctttgagaaatagcttatgaaaagaattgttgggggtttttttggaagaaggggcaggtatgatcggcaggacaccctgataggaagaggggaagcagaaatccaagcaccaccaaacacagtgtatgaaggggggcggtcatcatttcacttgtcaggagtgtgtgtgagtgtgagtgtgcggctgtgtgtgcacgcgtgtgcaggagcggcagatggggagacaacgtgctctttgttttgtgtctcttatggatgtccccagcagagaggtttgcagtcccaagcggtgtctctcctgccccttggacacgctcagtggggcagaggcagtacctgggcaagctggcggctggggtcccagcagctgccaggagcacggctctgtccccagcctgggaaagcccctgcccctcctctccctcatcaaggacacgggcctgtccacaggcttctgagcagcgagcctgctagtggccgaaccagaaccaattattttcatccttgtcttattcccttcctgccagcccctgccattgtagcgtctttcttttttggccatctgctcctggatctccctgagatgggcttcccaagggctgccggggcagccccctcacagtattgctcacccagtgccctctcccctcagcctctcccctgcctgccctggtgacatcaggtttttcccggacttagaaaaccagctcagcactgcctgctcccatcctgtgtgttaagctctgctattaggccagcaagcggggatgtccctgggagggacatgcttagcagtccccttccctccaagaaggatttggtccgtcataacccaaggtaccatcctaggctgacacctaactcttctttcatttcttctacaactcatacactcgtatgatacttcgacactgttcttagctcaatgagcatgtttagactttaacataagctatttttctaactacaaaggtttaaatgaacaagagaagcattctcattggaaatttagcattgtagtgctttgagagagaaaggactcctgaaaaaaaacctgagatttattaaagaaaaaaatgtattttatgttatatataaatatattattacttgtaaatataaagacgttttataagcatcattatttatgtattgtgcaatgtgtataaacaagaaaaataaagaaaagatgcactttgctttaatataaatgcaaataacaaatgccaaattaaaaaagataaacacaagattggtgttttttcctatgggtgttatcacctagctgaatgtttttctaaaggagtttatgttccattaaacgatttttaaaatgtacacttgaaaaaaaaaaaaaaaaa

SEQ ID NO: 907 - DNA, 3620 bp, Homo sapiens
gggaaaaggcatattcacaaggttacaataagtgagttttaggccttggccttcagggtcctggagtgtaaagactagaggaaaggagaccaagaaatcctaaccttacaacttagcaaaaaactgaatcttttttataagggtcagagctttagaaaatttttttaaacctaagctaaacaaagaatggcaaaagaaaatgccacttttatcgaagcctttatttttattacaactgattattttctgttagtgtagaaaactcagtaaaacaggatgtgttctagaaatattgtctaggagatataatcatgttttctgataaattgacagaaaaggaaaaattttgtatattattatagcattgtgtgcagtttgcagttagagccactatggatagtaattgtcattattcttagttgcttatcattttatttagaatttgtgagtttaagcttccattttaaggtaaaatcagttagtttgaacacacaataaataaggttaataaagcttatttattgatcatttctgtccacctacaatcattgccttttgcagggtgcctgtgagatataaaatttataactgccacatcctttcttaggaatttttaaatttctattttcttgtaatatgaatacaagaatacattcttgtaaatgaatgtattgaacattagttatggagtatttttcttagctacttgatattagatattgatcagtggaataaagttattgaacagcttggaacaccatgtcctgaattcatgaagaaactgcaaccaacagtaaggacttacgttgaaaacagacctaaatatgctggatatagctttgagaaactcttccctgatgtccttttcccagctgactcagaacacaacaaacttaaaggtactttttacaaatatgtacatttaatcccatttggggtgtgtagtgtgtgtgtatgggtttgtgtgtttatatgtattcatattcttatgggacatgaacccaaggttttctctggatggtggggaaaaaaatgaggtttttgttttttttttctttaatcttatatattttaatcatatgtataagataattttacagtaatatttttaaaacatatgctttttaaaaaatctcaaattgctgaaagttattaataatttgagaatctttacaaatatatgtacattaacaccattatgtttgcagccagtcaggcaagggatttgttatccaaaatgctggtaatagatgcatctaaaaggatctctgtagatgaagctctccaacacccgtacatcaatgtctggtatgatccttctgaagcagaagctgtaagttattttcttaatgtttacagaacatattgcattcttagagttagaatgacagttaggtttggaggagaccttttaattttaaataaaaatgtagatacatgatgatgatgtttttctgtttcttcatgaagactacgtcaaataaactaatgaacatattcgagcccctcctacacaaaataaagttacctcccactgttttttgcaatcttgcctggatacctaaccagagaactaggatgttgaatgctctgggggaacatcctaactcaggtataaaacaaattactgtatccaaaggaaaacagaattctgtgatctgtgatataaataaaatgtggcaatttcaagagctagaagaaaagaaaaaagacagttaaacattttatttcctgcaatgaaggagtcttcctaaactattatgtctgtataagtaagttgatgattgatcagtcttgatctaatgatatatttttataagtcatctgtgtggctaatatttcaaataactacagagttaaaatactcccagcatactgacttggttattattgccttgtgtttttcagccaccaccaaagatccctgacaagcagttagatgaaagggaacacacaatagaagagtggaaagaattgatatataaggaagttatggacttggaggagagaaccaagaatggagttatacgggggcagccctctcctttagcacaggtgcagcagtgatcaatggctctcagcatccatcatcatcgtcgtctgtcaatgatgtgtcttcaatgtcaacagatccgactttggcctctgatacagacagcagtctagaagcagcagctgggcctctgggctgctgtagatgactacttgggccatcggggggtgggagggatggggagtcggttagtcattgatagaactactttgaaaacaattcagtggtcttatttttgggtgatttttcaaaaaatgtagaattcattttgtagtaaagtagtttatttttttttaatttcaagtgatgtaatttaaaacctaagttgtgtttcaaaacagcaacaaaactgtattgtattttttttgctgtaattaactgtataatgtaaacctaattattttatcatggtttaaattttttgcatatttgctttatcttatgctgctgatttttttaactgaatttgtaagattttgtttatcaaagcaactattatgtggtgacttgcctatatcatgaattatttaagatttttatagttttttttaattagaatttatttcagatgttttgttcatgatactatccttcagggttatgtgcttatcaatgaaataaccccagaggagtgagggaaaataacgtgtagccagttatattcaggaataactactgtaaatgatgaacgtgttaggagacctccaatatttgctacttgccaatcctaatttagttacaagaattggtaggcaatcctacttaattttggcaaaagccccgtcatctaaatggcagaataactcagagcatgtctttgaagatgctgggcgtctaccaccaccttatgtccccaccctacccaacaaaaataagtaaaaagaatatggtgtattctacaaatttgtggcatgctcaaagtttatgatcacataaaggcaagaggatacttcatgaataatacatttcaatgcaaataaacagatggttcacttctactagctatgagcctgtttttgtatacactgagttaatctactcaggctgtaggtcccagcaatgttctagagtctggtctttccctttcctgcagcttcgggtccttggacctttcctgtttcctattacttggagtgtctgtcagttgagcaccagttgttctggtgtttcatttgattctacttgtagcataatcatttatacgagctattgggaggttccaaaccctacctagatttgtgtaggtgatgtatcaaatgagcaatataccgttcatctgaaaatagtagcacacagccatatataggatatcattttctaaggactgtttcttcacattgagcagagcaggcataaatggtggttatttagtctaagtcttttatttttttatacctgattttcaacataacacgcaatgtggatgtcgagtagtgttaagaatggtgctgctcctgacaagtgtatgttaactgtttacattttctatctgtagaattatttctctattactgaacttttcctaagtaaaatgtctttgaagtctcgttatttctgaaaaaaaaaa

SEQ ID NO: 908 - DNA, 261 bp, Homo sapiens
cttacattccaggcagggacgctgccccaggaggcccagggaggtacctctgagcagttgaatccggcgccggcagaaaggggctgccagaaagcatgaggctcccccacagacccctctgctgaggagtctttgcagctctggctggagcctttgttctcccccttaggcccatggacagaccttcacgttcccagatctgtttcccgagaaagacgagagccctgaaggcagcactgccgacgacctctacagcatgct

SEQ ID NO: 909 - DNA, 1605 bp, Homo sapiens
agtaagatggcggcgctgagggctttgtgcggcttccggggcgtcgcggcccaggtgctgcggcctggggctggaggccgattgccgattcagcccagcagaggtgttcggcagtggcagccagatgtggaatgggcacagcagtttgggggagctgttatgtacccaagcaaagaaacagcccactggaagcctccaccttggaatgatgtggaccctccaaaggacacaattgtgaagaacattaccctgaactttgggccccaacacccagcagcgcatggtgtcctgcgactagtgatggaattgagtggggagatggtgcggaagtgtgatcctcacatcgggctcctgcaccgaggcactgagaagctcattgaatacaagacctatcttcaggcccttccatactttgaccggctagactatgtgtccatgatgtgtaacgaacaggcctattctctagctgtggagaagttgctaaacatccggcctcctcctcgggcacagtggatccgagtgctgtttggagaaatcacacgtttgttgaaccacatcatggctgtgaccacacatgccctggaccttggggccatgacccctttcttctggctgtttgaagaaagggagaagatgtttgagttctacgagcgagtgtctggagcccgaatgcatgctgcttatatccggccaggaggagtgcaccaggacctaccccttgggcttatggatgacatttatcagttttctaagaacttctctcttcggcttgatgagttggaggagttgctgaccaacaataggatctggcgaaatcggacaattgacattggggttgtaacagcagaagaagcacttaactatggttttagtggagtgatgcttcggggctcaggcatccagtgggacctgcggaagacccagccctatgatgtttacgaccaggttgagtttgatgttcctgttggttctcgaggggactgctatgataggtacctgtgccgggtggaggagatgcgccagtccctgagaattatcgcacagtgtctaaacaagatgcctcctggggagatcaaggttgatgatgccaaagtgtctccacctaagcgagcagagatgaagacttccatggagtcactgattcatcactttaagttgtatactgagggctaccaagttcctccaggagccacatatactgccattgaggctcccaagggagagtttggggtgtacctggtgtctgatggcagcagccgcccttatcgatgcaagatcaaggctcctggttttgcccatctggctggtttggacaagatgtctaagggacacatgttggcagatgtcgttgccatcataggtacccaagatattgtatttggagaagtagatcggtgagcaggggagcagcgtttgatcccccctgcctatcagcttcttctgtggagcctgttcctcactggaaattggcctctgtgtgtgtgtgtgtgtgtgtgtgtgtgtatgttcatgtacacttggctgtcaggctttctgtgcatgtactaaaaaaggagaaattataataaattagccgtcttgcggcccctaggcctaaaaaaaaaa

SEQ ID NO: 910 - DNA, 3136 bp, Homo sapiens
ctttggtcctggctttcggcccgtagttgtagaaggagccctgctggtgcaggttagaggtgccgcatcccccggagctctcgaagtggaggcggtaggaaacggagggcttgcggctagccggaggaagctttggagccggccatggcacactaccccacaaggctgactaccagaaaaacttattcatgggttggcaggcccttgttggatcgaaaactgcactaccaaacctatagagaaatgtgtgtgaaaacagaaggttgttccaccgagattcacatccagattggacagtttgtgttgattgaaggggatgatgatgaaaacccgtatgttgctaaattgcttgagttgttcgaagatgactctgatcctcctcctaagaaacgtgctcgagtacagtggtttgtccgattctgtgaagtccctgcctgtaaacggcatttgttgggccggaagcctggtgcacaggaaatattctggtatgattacccggcctgtgacagcaacattaatgcggagaccatcattggccttgttcgggtgatacctttagccccaaaggatgtggtaccgacgaatctgaaaaatgagaagacactctttgtgaaactatcctggaatgagaagaaattcaggccactttcctcagaactatttgcggagttgaataaaccacaagagagtgcagccaagtgccagaaacccgtgagagccaagagtaagagtgcagagagcccttcttggaccccagcagaacatgtggccaaaaggattgaatcaaggcactccgcctccaaatctcgccaaactcctacccatcctcttaccccaagagccagaaagaggctggagcttggcaacttaggtaaccctcagatgtcccagcagacttcatgtgcctccttggattctccaggaagaataaaacggaaagtggccttctcggagatcacctcaccttctaagagatctcagcctgataaacttcaaaccttgtctccagctctgaaagccccagagaaaaccagagagactggactctcttatactgaggatgacaagaaggcttcacctgaacatcgcataatcctgagaacccgaattgcagcttcgaaaaccatagacattagagaggagagaacacttacccctatcagtgggggacagagatcttcagtggtgccatccgtgattctgaaaccagaaaacatcaaaaagagggatgcaaaagaagcaaaagcccagaatgaagcgacctctactccccatcgtatccgcagaaagagttctgtcttgactatgaatcggattaggcagcagcttcggtttctaggtaatagtaaaagtgaccaagaagagaaagagattctgccagcagcagagatttcagactctagcagtgacgaagaagaggcttccacaccgccccttccaaggagagcacccagaactgtgtccaggaacctgcgatcttccttgaagtcatccttacataccctcacgaaggtgccaaagaagagtctcaagcctagaacgccacgttgtgccgctcctcagatccgtagtcgaagcctggctgcccaggagccagccagtgtgctggaggaagcccgactgaggctgcatgtttctgctgtacctgagtctcttccctgtcgggaacaggaattccaagacatctacaattttgtggaaagcaaactccttgaccataccggagggtgcatgtacatctccggtgtccctgggacagggaagactgccactgttcatgaagtgatacgctgcctgcagcaggcagcccaagccaatgatgttcctccctttcaatacattgaggtcaatggcatgaagctgacggagccccaccaagtctatgtgcaaatcttgcagaagctaacaggccaaaaagcaacagccaaccatgcggcagaactgctggcaaagcaattctgcacccgagggtcacctcaggaaaccaccgtcctgcttgtggatgagctcgaccttctgtggactcacaaacaagacataatgtacaatctctttgactggcccactcataaggaggcccggcttgtggtcctggcaattgccaacacaatggacctgccagagcgaatcatgatgaaccgggtgtccagccgactgggtcttaccaggatgtgcttccagccctatacatatagccagctgcagcagatcctaaggtcccggctcaagcatctaaaggcctttgaagatgatgccatccagctggtagccaggaaggtagcagcactgtctggagatgcacgacggtgcctggacatctgcaggcgtgccacagagatctgtgagttctcccagcagaagcctgactcccctggcctggtcaccatagcccactcaatggaagctgtggatgagatgttttcatcatcatacatcacggccatcaaaaattcctctgttctggaacagagcttcctgagagccatcctcgcagagttccgtcgatcaggactggaggaagccacgtttcaacagatatatagtcaacatgtggcactgtgcagaatggagggactgccgtaccccaccatgtcagagaccatggccgtgtgttctcacctgggctcctgtcgcctcctgcttgtggagcccagcaggaacgatctgctccttcgggtgcggctcaacgtcagccaggatgatgtgctgtatgcgctgaaagacgagtaaaggggcttcacaagttaaaagactggggtcttgctgggttttgttttttgagacggggtcttgctctgtcgcccaggctggagtgcagtggcacgatcatggctcactgcagccttgacttctcaggcttaggtgaccccccaacctcatcctcccgggtggctgaaactacaggcacatgccaccatgcccagctgattttttgtagagacagggcttcaccatgttgccaagctagtctacaaagcatctgattttggaagtacatggaattgttgtaacaaagtatattgaatggaaatggctctcatgtattttggaattttccattaaataatttgctttttcctaaaaaaaaaaaaaaaaaaaaaaaaaaaaaaaaaaaaaaaaaaaaaaaaaaaaaaaa

SEQ ID NO: 911 - DNA, 1165 bp, Homo sapiens
gggccggaggagggacgcgccggagcgggaccgacgggaccgagcgagcgaccgacgcgccacccgccgacgcctcagccgcttggggcccgcacggaccctctacttcagtgtagaatgagccaaggagactcaaacccagcagctattccgcatgcagcagaagatattcaaggagatgaccgatggatgtctcagcacaacagatttgttttggactgtaaagacaaagagcctgatgtactgttcgtgggagactccatggtgcagttaatgcagcaatatgagatatggcgagagcttttttccccacttcatgcactgaattttggaattgggggagatacaacaagacatgttttgtggagactaaagaatggagaactggagaatattaagcctaaggtcattgttgtctgggtaggaacaaataaccacgaaaatacagcagaagaagtagcaggtgggatcgaggccattgtacaacttatcaacacaaggcagccacaggccaaaatcattgtattgggtttgttacctcgaggtgagaaacccaatcctttgaggcaaaagaacgccaaggtgaaccaactcctcaaggtttcgctgccgaagcttgccaacgtgcagctcctggataccgacgggggttttgtgcactcggacggtgccatctcctgccacgacatgtttgattttctgcatctgacaggagggggctatgcaaagatctgcaaacccctgcatgaactgatcatgcagttgttggaggaaacacctgaggagaaacaaaccaccattgcctgactggctcttatcagtgttaatagcatctcagcttcctcagatcagttctatcactggcactacagaatccttctctttcttaaggcactttgcattgtagaatgttcctggatgttcatatctagtgtttgaaggggaggagggatttaaactggtcctgtacatagaaggtttgtttgacagaggagaaaaattagccaaggaagattgttgtttaaattcatttgaaaccagaaggggactttttagttgtatgtgtaacacattcattgaattattatcactgttttcttgggacaacatcaagcctaaatactgaacaatatgaagattaaaaaaaaaaaaaaaaaaaaaaaaa

SEQ ID NO: 912 - DNA, 1458 bp, Homo sapiens
ggaccaagatggcggcggtgtctggcttggtgcggagaccccttcgggaggtgacagttcgtgatgctataaatcagggtatggatgaggagctggaaagagatgagaaggtatttctgcttggagaagaagttgcccagtatgatggggcatacaaggttagtcgagggctgtggaagaaatatggagacaagaggattattgacactcccatatcagagatgggctttgctggaattgctgtaggtgcagctatggctgggttgcggcccatttgtgaatttatgaccttcaatttctccatgcaagccattgaccaggttataaactcagctgccaagacctactacatgtctggtggccttcagcctgtgcctatagtcttcagggggcccaatggtgcctcagcaggtgtagctgcccagcactcacagtgctttgctgcctggtatgggcactgcccaggcttaaaggtggtcagtccctggaattcagaggatgctaaaggacttattaaatcagccattcgggataacaatccagtggtggtgctagagaatgaattgatgtatggggttccttttgaatttcctccggaagctcagtcaaaagattttctgattcctattggaaaagccaaaatagaaaggcaaggaacacatataactgtggtttcccattcaagacctgtgggccactgcttagaagctgcagcagtgctatctaaagaaggagttgaatgtgaggtgataaatatgcgtaccattagaccaatggacatggaaaccatagaagccagtgtcatgaagacaaatcatcttgtaactgtggaaggaggctggccacagtttggagtaggagctgaaatctgtgccaggatcatggaaggtcctgcgttcaatttcctggatgctcctgctgttcgtgtcactggtgctgatgtccctatgccttatgcaaagattctagaggacaactctatacctcaggtcaaagacatcatatttgcaataaagaaaacattaaatatttagtttggacttgaatatcaagtcgttgaaaattatttgaaatacttgctggcactgcacctggatttgtactgcaagacctgactattcataacggaaaatgatttctaaagcaacagcaggtatttttgtacagggaagtttaaatgtgtttgtgtatggaaaactctccactctcctcccctagatgccatgcttccttttgtctgttacggttgccatgttctttgaataacaaattatataacattttatcctctctcaccacaaggacaaagtatggatgtggcagagccctgatgaaagatgtatccaaacaagataacttatatgtataaaattaaagcatataatatacgtttactgttagtttgttttgataaggaataaaggaatttctaacatgaaaaaaaaaaataaaaaaaaa

SEQ ID NO: 913 - DNA, 3873 bp, Homo sapiens
atgagtggccccctagaaggggctgatgggggaggggaccccaggcctggggaatcattttgtcctgggggcgtcccatcccctgggcccccacagcaccggccttgcccaggccccagcctggccgatgacaccgatgccaacagcaatggttcaagtggcaatgagtccaacgggcatgagtctagaggcgcatctcagcggagctcacacagctcctcctcaggcaacggcaaggactcagccctgctggagaccactgagagcagcaagagcacaaactctcagagcccatccccacccagcagttccattgcctacagcctcctgagtgccagctcagagcaggacaacccgtccaccagtggctgcagcagtgaacagtcagcccgggcaaggactcagaaggaactcatgacagcacttcgagagctcaagcttcgactgccgccagagcgccggggcaagggccgctctgggaccctggccacgctgcagtacgcactggcctgtgtcaagcaggtgcaggccaaccaggaatactaccagcagtggagcctggaggagggcgagccttgctccatggacatgtccacctataccctggaggagctggagcacatcacgtctgagtacacacttcagaaccaggataccttctcagtggctgtctccttcctgacgggccgaatcgtctacatttcggagcaggcagccgtcctgctgcgttgcaagcgggacgtgttccggggtacccgcttctctgagctcctggctccccaggatgtgggagtcttctatggttccactgctccatctcgcctgcccacctggggcacaggggcctcagcaggttcaggcctcagggactttacccaggagaagtccgtcttctgccgtatcagaggaggtcctgaccgggatccagggcctcggtaccagccattccgcctaaccccgtatgtgaccaagatccgggtctcagatggggcccctgcacagccgtgctgcctgctgattgcagagcgcatccattcgggttacgaagctccccggataccccctgacaagaggattttcactacgcggcacacacccagctgcctcttccaggatgtggatgaaagggctgcccccctgctgggctacctgccccaggacctcctgggggccccagtgctcctgttcctgcatcctgaggaccgacccctcatgctggctatccacaagaagattctgcagttggcgggccagccctttgaccactcccctatccgcttctgtgcccgcaacggggagtatgtcaccatggacaccagctgggctggctttgtgcacccctggagccgcaaggtagccttcgtgttgggccgccacaaagtacgcacggcccccctgaatgaggacgtgttcactcccccggcccccagcccagctccctccctggacactgatatccaggagctgtcagagcagatccaccggctgctgctgcagcccgtccacagccccagccccacgggactctgtggagtcggcgccgtgacatccccaggccctctccacagccctgggtcctccagtgatagcaacgggggtgatgcagaggggcctgggcctcctgcgccagtgactttccagcagatctgtaaggatgtgcatctggtgaagcaccagggccagcagctttttattgagtctcgggcccggcctcagtcccggccccgcctccctgctacaggcacgttcaaggccaaggcccttccctgccaatccccagacccagagctggaggcgggttctgctcccgtccaggccccactagccttggtccctgaggaggccgagaggaaagaagcctccagctgctcctaccagcagatcaactgcctggacagcatcctcaggtacctggagagctgcaacctccccagcaccactaagcgtaaatgtgcctcctcctcctcctataccacctcctcagcctctgacgacgacaggcagaggacaggtccagtctctgtggggaccaagaaagatccgccgtcagcagcgctgtctggggagggggccaccccacggaaggagccagtggtgggaggcaccctgagcccgctcgccctggccaataaggcggagagtgtggtgtccgtcaccagtcagtgtagcttcagctccaccatcgtccatgtgggagacaagaagcccccggagtcggacatcatcatgatggaggacctgcctggcctagccccaggcccagcccccagcccagcccccagccccacagtagcccctgacccagccccagacgcctaccgtccagtggggctgaccaaggccgtgctgtccctgcacacacagaaggaagagcaagccttcctcagccgcttccgagacctgggcaggctgcgtggactcgacagctcttccacagctccctcagcccttggcgagcgaggctgccaccacggccccgcacccccaagccgccgacaccactgccgatccaaagccaagcgctcacgccaccaccagaaccctcgggctgaagcgccctgctatgtctcacacccctcacccgtgccaccctccaccccctggcccaccccaccagccactacccccttcccagcggttgtccagccctaccctctcccagtgttctctcctcgaggaggcccccagcctcttccccctgctcccacatctgtgcccccagctgctttccccgcccctttggtgaccccaatggtggccttggtgctccctaactatctgttcccaaccccatccagctatccttatggggcactccagacccctgctgaagggcctcccactcctgcctcgcactccccttctccatccttgcccgccctccccccgagtcctcctcaccgcccggactctccactgttcaactcgagatgcagctctccactccagctcaatctgctgcagctggaggagctcccccgtgctgagggggctgctgttgcaggaggccctgggagcagtgccgggcccccacctcccagtgcggaggctgctgagccagaggccagactggcggaggtcactgagtcctccaatcaggacgcactttccggctccagtgacctgctcgaacttctgctgcaagaggactcgcgctccggcacaggctccgcagcctcgggctccttgggctctggcttgggctctgggtctggttcaggctcccatgaagggggcagcacctcagccagcatcactcgcagcagccagagcagccacacaagcaaatactttggcagcatcgactcttccgaggctgaggctggggctgctcggggcggggctgagcctggggaccaggtgattaagtacgtgctccaggatcccatttggctgctcatggccaatgctgaccagcgcgtcatgatgacctaccaggtgccctccagggacatgacctctgtgctgaagcaggatcgggagcggctccgagccatgcagaagcagcagcctcggttttctgaggaccagcggcgggaactgggtgctgtgcactcctgggtccggaagggccaactgcctcgggctcttgatgtgatggcctgtgtggactgtgggagcagcacccaagatcctggtcaccctgatgacccactcttctcagagctggatggactggggctggagcccatggaagagggtggaggcgagcagggcagcagcggtggcggcagtggtgagggagagggctgcgaggaggcccaaggcggggccaaggcttcaagctctcaggacttggctatggaggaggaggaagaaggcaggagctcatccagtccagccttacctacagcaggaaactgcaccagctag

SEQ ID NO: 914 - DNA, 2427 bp, Homo sapiens
gggagaagatggcggtcgccgtaagaactttgcaggaacagctggaaaaggccaaagagagtcttaagaacgtggatgagaacattcgcaagctcaccgggcgggatccgaatgacgtgaggcccatccaagccagattgctggccctttctggtcctggtggaggtagaggacgtggtagtttattactgaggcgtggattctcagatagtggaggaggacccccagccaaacagagagaccttgaaggggcagtcagtaggctgggcggggagcgtcggaccagaagagaatcacgccaggaaagcgacccggaggatgatgatgttaaaaagccagcattgcagtcttcagttgtagctacctccaaagagcgcacacgtagagaccttatccaggatcaaaatatggatgaaaagggaaagcaaaggaaccggcgaatatttggcttgttgatgggtacccttcaaaaatttaaacaagaatccactgttgctactgaaaggcaaaagcggcgccaggaaattgaacaaaaacttgaagttcaggcagaagaagagagaaagcaggttgaaaatgaaaggagagaactgtttgaagagaggcgtgctaaacagacagaactgcggcttttggaacagaaagttgagcttgcgcagctgcaagaagaatggaatgaacataatgccaaaataattaaatatataagaactaagacaaagccccatttgttttatattcctggaagaatgtgtccagctacccaaaaactaatagaagagtcacagagaaaaatgaacgctttatttgaaggtagacgcatcgaatttgcagaacaaataaataaaatggaggctaggcctagaagacaatcaatgaaggaaaaagagcatcaggtggtgcgtaatgaagaacagaaggcggaacaagaagagggtaaggtggctcagcgagaggaagagttggaggagacaggtaatcagcacaatgatgtagaaatagaggaagcaggagaggaagaggaaaaggaaatagcgattgttcatagtgatgcagagaaagaacaggaggaggaagaacaaaaacaggaaatggaggttaagatggaggaggaaactgaggtaagggaaagtgagaagcagcaggatagtcagcctgaagaagttatggatgtgctagagatggttgagaatgtcaaacatgtaattgctgaccaggaggtaatggaaactaatcgagttgaaagtgtagaaccttcagaaaatgaagctagcaaagaattggaaccagaaatggaatttgaaattgagccagataaagaatgtaaatccctttctcctgggaaagagaatgtcagtgctttagacatggaaaaggagtctgaggaaaaagaagaaaaagaatctgagccccaacctgagcctgtggctcaacctcagcctcagtctcagccccagcttcagcttcaatcccagtcccaaccagtactccagtcccagcctccctctcagcctgaggatttgtcattagctgttttacagccaacaccccaagttactcaggagcaagggcatttactacctgagaggaaggattttcctgtagagtctgtaaaactcactgaggtaccagtagagccagtcttgacagtacatccagagagcaagagcaaaaccaaaactaggagcagaagtagaggtcgagctagaaataaaacaagcaagagtagaagtcgaagcagtagcagtagcagttctagtagcagttcaaccagtagcagcagtggaagtagttccagcagtggaagtagtagcagtcgcagtagttccagtagcagctccagtacaagtggcagcagcagcagagatagtagcagtagcactagtagtagtagtgagagtagaagtcggagtaggggccggggacataatagagatagaaagcacagaaggagcgtggatcggaagagaagggatacttcaggactagaaagaagtcacaaatcttcaaaaggtggtagtagtagagatacaaaaggatcaaaggataagaattcccggtccgacagaaagaggtctatatcagagagtagtcgatcaggcaaaagatcttcaagaagtgaaagagaccgaaaatcagacaggaaagacaaaaggcgttaatggaagaagccaggctttcttagccattctttgcagcagaagatttcttgataaaaaaggattacctttccttgtaaagaggatgctgccttaagaattgcatgttgtaaaaaatctttttggaagatacagactgtttgtttaccagacattcttgtactttttgcataattttgtaagagttatttatcaaaattatgtgaggttccaaaatatgtaaaaatgataataataaaaaaagattaacatcaaaaaaaaaaaaaaa

SEQ ID NO: 915 - DNA, 1709 bp, Homo sapiens
cgtgtgccatggactcagccgcccggtgatattgacaataggagagagaaaggggcattgactgggacccaccgcgggtagcgaaaggtggctctggcagcggcggctccagctcctgcggctcctcctccttattctgtccccttctcttgctgccgctgcagatccagtcttcctccctcccttcccctcctccccacgtcgtcgccgccgccgccgggtccggggcaacgagctgaggcgccgcccgccaggaatgtgagcgaggagccagcggcggagccgcaacggggtcggtgccgatttgatgggacgggcccgcgggggaggatcgtgaggccgccgccgccaccggaacgctgaggttcgggtccggccgtgaggcctagaggctccgccgccgcggaaccggagggaccccgtaccggacagccgtcgccccaggctccccgcagctgcccggacctccccctgcacgtcccggtcccgccgcccgcccccgctgcggccacctcgcccgtctcccgcccctccaagccacagatcatcttcggattcttccccagaagcttcaagtagggatatgtcctcagcaccaactactcctccatcagtggataaagtagacggattttctcggaagtccgtcagaaaagccagacagaagaggtcgcaaagttcctcacagtttaggtctcaaggcaagcctattgagttaacacctctgccgctgctaaaaggtatcttgcaatatattcagaactctccctcctagtgacagcaatgaatttgatccagaagaagatgaacctacccttgaggcatcgtggccacacttacagcttgtatatgaatttttcatacgatttttggaaagccaagaattccaacccagcattgccaaaaaatatatagatcagaaatttgtattacagcttctggagctatttgacagcgaagaccctcgggaacgggactacttaaaaacagtcttacacagaatttatggcaagtttcttggtcttagagcatttatccgaaaacagattaacaatatttttctaaggtttgtttatgaaacagaacacttcaatggtgtagctgaactgctggaaatattaggaagtattatcaatggctttgctttacctcttaaggcagaacacaaacagtttctggtgaaagtattgatccctttacacactgtcaggagcttatcactcttccatgcacagctggcatattgtatagtacagtttctggagaaagatccttcactcacagaaccagttattagggggttaatgaaattttggcctaaaacatgtagtcaaaaagaggtcatgttccttggggaactggaagaaatattggatgtgattgaaccttcacaatttgttaaaatccaagaacctttgtttaaacaaatcgccaagtgtgtatctagcccccattttcaggtggcagaaagagcactctattattggaataatgaatacatcatgagtttgatagaagaaaactctaacgtcatccttcccatcatgttttccagcctttataggatttcaaaagaacattggaatccggctattgtggcgttggtgtacaatgtgttgaaggcatttatggaaatgaacagcaccatgtttgacgagctgacagccacatacaagtcagatcgtcagcgtgagaaaaaaaaaaaaaaa

SEQ ID NO: 916 - DNA, 2353 bp, Homo sapiens
agtaacaatgtattctttgcacatatcttgtgttatttctttaaaatagacccttacaagtgaatctgtgagctaaaggattgcatactttttaaagatgcttgatgcacattaaattgccccctacagaaaagttattcccacaagcacagtatgagagatcctgtttctcatacttgctgttttgcttatcttttcttgaaagacacataaaacaaggtaagagcataggaatagacttatgagactgaatatgctgttttcaacccttcttccaggactctacagtattggacctgcgagggattgggcaagtgttgccaacccatctgatggaagagcgtctaatccgacagcaacaggaaatggaagaagatcagcgctggctggaaaaagaggaaagatttctggtaattgtgtttctgaaaggcttctttgactttttaagccctgttagagtctactatattgcaaattattgcaaaatgttatctttcaaagcaggagagttagttttacaactacttcttaaaacttggaataggccaggcatggtggcctatttgggaggctgaggcaagcagatcacctgaggtcaggagttcgagaccagcctggccaacatggtgaaaccctgtctctactaaaaatacaaaaagtagccgggtgcatgcctgtaatcccagctacttgggaggctgaggcaggagaatcgcctgaacccaggaggtggaggttgcagtgagctgagatcatgccattgcattccagcctgggcgacgagtgaaactccatctcaaaaaaaaaaaaaaactacttgaaataatatggctggatgtggtggttaatgcctaaaatcccagtgctttgggaggccaaggcaggaggatcacttgagcccaggagttcaagaccagcctgggcaacacagcaagaccctgtctctacaaaaaataaaaaaaaaaattagccaggcattgtggctcacacctgtagtcccaaatatttgagaggctaagactgagtccaggagttctagattacggtaagctatgattgtgccactgccctctaatagatccagaatcctatatccaaaacccttaagggccatgtgtgtttcagaattcagtattttttaaatactaaaaagttagtgtagtatgctgaacattatacattatttaagactctaatagcatcccagagttaaaaccactagtgtttctgcagcagaatgcaaataatcacattaacagttaaatgaagattataagatgcttcatcggttcaggttttactaccatattagtttgtttcaaacataaaaaacacacttaacattttcagcactttttaggttttggaaatgaggatagaggaatgtggacctgtccatttattatcttcattttaacagaacaggaaatagagatctagagagaccctgggccacagagcaagactctgtctcctaaggaaaaaaaaaaaaacttgcaataatgggttatttgcttttttaattatcttttggggataaatttctctaaaattttagtagtgtcattatgggctcagaaatatgagcatttgtttggtttttgcattaccacattgtttacccagaaacaactcctgcttccatgtcagcttacgtataaactattgcatcttgctactgcaggctgtataacaagacagctaagatttgccttcctggcatttatgactgatgtgaacctcctcccggatgtgtctggacatatgcatgggaaatgtcttctttcaggcaacccttattgaaaaccacttcagaagtcccttggggacagagaggaagtggtgggacagagcaatctctgtatgttacttgacacaaaggtccttttagactcctggtccctgttgccaagcagttctatgccctcagcctcagaactaaggactgtgagaacccattccccactctccttgaacccagaatagctatttcaatcttcctgtagttgcctcaatcgtattatggctgaaagaagccaggattcataattttgagccagtaactttacctggtctctcatgctttgtatcattaaacattcactgacactaactttgtgttaaatttaactaatttagaatttcgaaagcataggataaaactttccttctgaattaaagcaaatcttgagattgtaaggcagatgggaaaaaaaaattgttatttttggcctggcacggtggatcacacctgtaatccatcccagcactttgggaggccaaggtgggcagatcacttgaggccaggagttcgagaccagcctagcccacatggtgaaaccccgtctctact

SEQ ID NO: 917 - DNA, 1758 bp, Homo sapiens
cttaagtgacccgttcccccttcacccagcaccgtttgttgagggcctgccatatctgggccccgagtacccagtctgtagggaaagtggacatccatactcaccccccaggcatggccctgggaggctgactgtgcatggctccagggaggccagggacagggccctgagcgggtgatccctgggctggacaccaaggttgagaagttaggccggcagcgtggaggggacagcactgtgggggtggcccggtgtggggaggggacatggggttttgggacggtcacaccacttcatctagacaccacagccaggcacatctgtcaggcttagttctccatgcgccatcctcaagaggcaccagcactttatctgttgagcctttatgtggcaccaactgtgtgcactattacccggttttacagatgatggaggcccagaagcaggaggtggctggtgttaggtcacacagctaggaggcagcagaacggtggggcgctgcctgtgctcttaacccccaggccaagtcaccccatcaggcagtcaggagggctggcggcagggggtgatgtgggtgggaggtagtgccttcttggcattctcaccgcagcctgggtgccgggtgccactctgacctcagccatggcagggtcgggggatgccgatgggcgctgcacgggctctcagaggcccctcacctatggccatggccttgactgtgggggcctctgtccaccgatgatctcccttcatcccctacaggtggggcggtccagggtggtgggggcacagtggccccgggcagtgaccacagggtcctgacccgcggcccccgcaggcgggctgcatgctgttcccccacatctccccctgtgaggtgcgcgtgctcatgctcctgtactcgtccaagaagaagatcttcatgggcctcatcccctacgaccagagcggcttcgtcagtgccatccggcaggtcatcaccacccgcaagcaggcagtgggacctggtggtgtcaactcaggcccagtccagatcgtcaacaacaagtttctggcatggagtggtgtcatggagtggcaggagcccaggcctgagcccaacagtcggtccaagaggtggctgccatcccacgtctacgtgaaccagggggagatcctgaggaccgagcagtggccaaggaagctgtacatgcagctcatcccgcagcagctgctgaccaccctagtgccgctgttccggaactcgcgcctggtccagttccacttcaccaaggacctggagacactgaagagcctgtgccggatcatggacaatggcttcgccggctgcgtgcacttttcctacaaagcatcgtgtgagatccgcgtgcttatgctcctgtactcttcagagaagaaaatcttcattggcctcatcccccatgaccagggcaactttgtcaacggcatccggcgtgtcattgccaaccagcagcaggtcctgcagcggaacctggagcaggagcaacagcaacgagggatgggggggtagtggttaccccgggctgggcccctccaggagtcacagatgaggcccccgcaaagactggtgacacgcttttgagcaggggcccctggggacttcaactgcccagcaacatggaggatggtgtcctgaggcctccaaggacggtcccacccctctacgtttccccaataaagccttttaaaaccccaaaaaaaaaaaaaaaaaaaaaaaaaaaaaaaaaaaaaaaaaaa

SEQ ID NO: 918 - DNA, 680 bp, Homo sapiens
ccgctgcggcgccgggcatttctccgcagctcggctcgcggccgcgcccgccgccgcccggcccgcgcccatgcaggccatcaagtgcgtggtggtcggcgacggcgccgtggggaagacatgcttgctgatcagctacacgaccaacgccttccccggagagtacatccccaccgtttttgacaactactctgccaacgtgatggtggacgggaaaccagtcaacttggggctgtgggacacagcgggtcaggaggactacgatcggctgcggccactctcctacccccaaactgacgtctttctgatctgcttctctctggtgagcccggcctccttcgagaatgttcgtgccaagtggtacccggaggtgcggcaccactgcccccacacgcccatcctcctggtgggcaccaagctggacctccgcgacgacaaggacaccattgagcggctgcgggacaagaagctggcacccatcacctacccacagggcctggccatggcccgggagattggctctgtgaaatacctggagtgctcagccctgacccagcggggcctgaagacagtgtttgacgaggcgatccgcgcggtgctctgcccgcccccagtgaagaagccggggaagaagtgcaccgtcttctagagccctggcccacccgagcctgagggctggc

SEQ ID NO: 919 - DNA, 642 bp, Homo sapiens
ggcctgcagagtcagtgtgcggtttgggagaaaatgtgtcggatattttggggcggtcacgtgggcgggcgggctccgagaggccccgggacagtcccagcctagagccgtgcccccccaggagccccccagtacggcgagccccggacattgcgacgctccatccaagagactgcccgacgccgggacctcggggctccgccgcctcccttccccctcccactccagctacggcccagttccctcaacctgacccagtatgtagaagccagtctctgcaggcggccagcgggacttttggaggcccagtgggcaggccaggcagggcgggtacggagcctcccaggctggggcagtgggcatgggcaggggctgtggctgaagacctcgcccgcccactgcagaccccaggggactctcacaccgcagctgccatggccaccaataaggagcgactctttgcggctggtgccctggggcctggatctggctacccaggggcaggtttccccttcgccttcccaggggcactcagggggtctccgcctttcgagatgctgagccctaactttcggggcctgggccagcctgaccttcccaaggagatgggctctctgtcggtggagacacagagcaccagct

SEQ ID NO: 920 - DNA, 358 bp, Homo sapiens
cctctccatgatgtcttcgttagaaaagtaaaaatgctgaagaagcccaagtttgaatgtaagtgagaaatcacatgattcctgtagggccaaatacattgtttttgggtggaggaggagtgtggggccatatcatggccttctttttcttcctgtcatgcttgcatagtagtgatgaccattatttcaagatatactaacagttttttggtttttttttttttttttttttttttgccttttagtgggaaagctcatggagcttcatggtgaaggcagtagttctggaaaagccactggggacgagacaggtgctaaagttgaacgagctgatggatatgaaccaccagtccaagaa

SEQ ID NO: 921 - DNA, 6197 bp, Homo sapiens
ggttaagtggagctagagagctacattgtaacctagttggatttttttggggggggaatgtatcagaatctaacgtgtcgttaatagaaagaagaacaggcaagaagtggtccagccggcgaagttgcagatctgatctcttctgaacacctcatcgtgtctccatccctgggaatctgaccctagcaactggaccactttgttcttggaattttgggtgtcctcttttctcacctttcccttttcccttttccccttccccctcctgagaactccggaagactgtagagattgtcatggagtccagggaaaccttaagcagctcccggcaaagagggggcgagtcagacttcctgccggtctcctcagccaagcccccagctgctcctggctgtgcaggagaacctttgctctccactccaggacctgggaaggggatcccggtgggcggagagcgcatggagccagaggaggaggatgaactaggctcagggcgggatgtggattccaactccaacgcggacagtgagaaatgggtggcaggagatggtttggaagagcaggaattttctatcaaggaggcaaacttcacagagggaagtctgaagctaaagattcagaccacaaagcgggctaagaaacccccaaagaatttggagaactatatatgtccacctgagatcaagatcaccatcaagcagtctggggaccagaaggtgtcccgtgctggaaaaaatagcaaagccacgaaggaggaagaaagaagccactccaaaaagaagctcctcacagccagtgaccttgcagccagtgacctcaaaggatttcagccacaggcttacgagaggccccagaaacattcaactctccattatgacacgggcctcccacaggacttcaccggtgacaccttaaaaccaaagcaccagcaaaaaagcagcagccagaaccacatggactggtccaccaactctgacagcggacccgtcactcagaattgcttcatcagtccagagtctggcagagaaactgcaagcaccagcaagatccccgctcttgagcccgtggcttcctttgcaaaggcccagggtaagaaaggcagtgcagggaacacgtggagtcagttgtctaacaataacaaagatctgctcttgggaggtgtggctccatccccaagcagccacagctcaccagccccacccagcagctctgctgagtgcaacgggcttcagcccttggtggatcaagatggaggaggtacaaaggagcccccagaaccacctacggtgggcagcaagaaaaagtccagtaaaaaagatgtgataagtcagaccataccaaacccagacctggattgggtcaagaatgcccagaaagcatttgacaatacagaagggaaaagggaaggttattccgcagatagtgcccaagaggcatcaccagccaggcagaacgtgagttctgccagtaatcctgaaaatgactcaagtcatgtccggattactatccccatcaaggcaccctctctggatccaaccaaccataagaggaaaaaaagacagtccattaaagcggtggtggaaaagatcatgccagagaaagccttggcttctggaatcaccatgagcagtgaagtagttaacaggatactttccaactctgaggggaataagaaggatccccgtgtccctaagttgagtaaaatgatagagaatgagtccccctcagttggccttgaaactggtggaaatgctgagaaagttatcccaggaggtgtgtctaagccgcggaagccacccatggtcatgacacctccaacgtgcacagatcactctccatccagaaagctgccagaaatccagcatccaaaatttgctgcaaaacgaaggtggacttgcagcaaaccaaaacctagcaccatgcttcgagaggcagttatggccacctctgataaactgatgctggagcccccgtctgcatatcccatcaccccatccagccctctctacaccaacacagacagtcttactgtgatcactccagtcaaaaagaagcggggacgaccaaagaagcagcctttgctcacagtcgagacgattcatgagggaacttccaccagccccgtcagtcccatcagccgagagtttcctggcactaagaaaagaaagcgacgacgcaatttagcgaagttggcccagctagtgccgggagaggacaaacccatgagcgagatgaaatttcacaagaaagttggaaagctcggcgtgttggataagaagaccatcaaaactatcaataagatgaagacactcaagaggaaaaacatcttgaatcagatcttgtcctgttccagcagcgttgctctgaaggcaaaagctcccccagagaccagccctggggcagcagccattgaaagcaaactgggcaagcagattaatgtcagcaagaggggaaccatctacattggcaagaagcggggcaggaagccaagagcagagctgccacccccatccgaagaacccaaaacagccatcaagcaccccaggcctgtttctagccagccggatgttccagccgtgccttccaactttcagtcacttgtggcgtcttcaccagcagctatgcacccactttcaacacagttaggtgggtccaatggcaacctgagccctgccagcactgaaaccaatttttcagagttgaaaactatgccaaatctccagcccatcagtgctcttccaaccaaaacccaaaagggaatacacagtggaacctggaagctgtctccacccagactgatggccaactccccttcacacctgtgcgagattggctccctaaaggaaatcacgctgtcccctgtgagcgagtcccacagtgaggagacgatccccagcgacagcggcattgggacagacaacaacagcacttctgaccaagcggagaagagctcagaatcccgaaggaggtactcttttgatttctgctccctggacaacccggaggccattccgtccgacaccagcacaaagaaccggcatggccaccggcaaaagcatctcattgtggacaactttctggcccacgaaagcctcaagaagccaaagcacaagaggaaacggaaaagcctgcaaaaccgcgatgacctccagtttctggcagacctggaggagctaatcaccaagttccaagtgttcagaatctcccaccggagttacaccttctaccacgagaatccatatcccagcatttttcggattaattttgatcactattacccggtgccatatatccagtatgacccgttgctctatcttcgtaggacttcagacttgaagtcaaagaagaagcgtggtaggcctgcaaaaaccaatgacaccatgacaaaggtgccttttttacaagggttcagctaccctattcccagtggaagttactatgcaccctatggaatgccttacacatcaatgcctatgatgaaccttggttattacggtcagtacccagctcctttgtacctatcgcacacgcttggagcagcttccccattcatgaggccaacagtgccaccacctcagttccacacaaactcccacataaagatgtccggtgcagctaagcataaagccaagcatggagtacacctgcagggacctgttagcatgggccttggtgacatgcagccttctctgaaccctcccaaggtaggcagtgccagtctgtccagtggtcggctccataagaggaaacacaaacacaagcataagcacaaggaagaccggatcctagggacccatgacaacctgagtggtctttttgcaggcaaagccacaggcttctccagccacatcctgagcgagcggctgagtagcgcagacaaagagctcccgctggtgagtgagaagaacaagcataaggagaaacagaagcaccagcacagcgaagccggccacaaagcttctaagaacaactttgaggtggacaccctgtctacactgtcactttccgacgcccagcattggacacaggccaaggaaaaaggagacttgagcagtgagcctgtggactcatgcacgaaaagatactctggcagtggcggggatggtggcagcacgagatcggagaacctggacgtgttcagtgaaatgaacccttcgaatgacaagtgggacagtgacgtgagtgggagtaaaaggaggagctatgaaggctttggaacgtacagggaaaaggacatccaagccttcaagatgaaccgcaaggagagaagttcttatgactcctccatgtctccagggatgccaagtccccacttaaaagtggaccagacagcagtgcatagtaagaacgaaggctcagtgcccaccatgatgaccaggaagaagccagccgcagttgacagtgttacaattccaccagccccagtgttatctctccttgctgcatctgcagcaacgtcggatgcagtcggctcctccctgaagaagaggttcaagcggcgggagatcgaagccatccagtgcgaagtgcggaagatgtgcaactacaccaagatcctgtccaccaagaagaacctggaccacgtgaacaagatcctgaaggccaagcggctgcagagacaatcaaaaacaggcaacaacttcgtgaagaagaggcgcgggcgtcccaggaagcagcccacccagttcgatgaggactccagagaccaaatgccggtgctggaaaaatgcatcgacctgcccagcaaaagaggccagaagcccagcctgagcccgctggtgctggagcccgccgccagccaagacaccatcatggccaccatcgaggcggtcatccacatggcccgggaggcgccgcccctgcccccgccaccgccgccgcccctgccgccaccgccgccaccacccctgcccccgccaccccctctacccaagaccccccgaggcggaaagaggaaacacaaaccgcaggcccccgctcagcccccacagcagtcgcccccgcagcagccccttccccaggaagaggaggtgaaagccaaaaggcagaggaagtcccgagggagtgagagcgaggtccttccctagggcgggtctgggcgtctgcacctggggcctagggaactgacacgtgggaagcgcagtgagccggggcgggggcggaatcccccgctgcagggacacccacgcccttctctccagaagccgggcaggcagaatccggccagacgacggggctgagccatcaggagctcttgggaaagcaaagcagggagacaccttcagaagaagcttgtctgagcttcaccgcagctcccaccacgcggcgcttcagtacggctggatcctccgcaggcgagcggaaggcccccaggaggagcaggctggtggcactctcctgacctcacgctgccaaggtgcgccctcgactcccgatttcatttgctggccaggaaaatcgaaagggaaacaccctcaattaggaaacattccaaggggagaaaagctgcaaattgctcaactggcattgctgtaacccgttccatttaattggtttttatttcttttgattttcaagctctgctaagctttggggtaccaacgtcatcttcaggtgacctgaatctttcccttaaccgtacagtttctcgatggaattgtgtgatcagaaggtggaattctagtgataggcgacctcagacccgcattcatgttctgtgtgcctcttctattgcacatacactgatttttagcattgtctattcctatttttcctttgcccattgtacttccatatatcttttcattaacttacttgctgccttttttttttcttggtacacatttaaataaagtaatccttaacctgtgctgtaaagttcacccttggcatgctgttccaagaacctgggtttgaatcccaatcgttgtgaaacatactcagtattgataaaacctttttaataagtgatgcagagcagccaaggatatgttgacccagatgtcaaccaggctatttttatacttaaaacatgtcagcagagcataggcagaataaaatggtttaaataccccacagcaaatagagtaactgacaaaccaccaaaaactgaaaccccagacccaccagaaagacaagtgtctagcaatgccttggtacctgatctttttcattcaaataattgtcataggttgttc

SEQ ID NO: 922 - DNA, 1494 bp, Homo sapiens
cttggtgacactggatagaacagctcaagccttgccacttcgggcttctcactgcagctgggcttggacttcggagttttgccattgccagtgggacgtctgagactttctccttcaagtacttggcagatcactctcttagcagggtctgcgcttcgcagccgggatgaagctggtttccgtcgccctgatgtacctgggttcgctcgccttcctaggcgctgacaccgctcggttggatgtcgcgtcggagtttcgaaagaagtggaataagtgggctctgagtcgtgggaagagggaactgcggatgtccagcagctaccccaccgggctcgctgacgtgaaggccgggcctgcccagacccttattcggccccaggacatgaagggtgcctctcgaagccccgaagacagcagtccggatgccgcccgcatccgagtcaagcgctaccgccagagcatgaacaacttccagggcctccggagctttggctgccgcttcgggacgtgcacggtgcagaagctggcacaccagatctaccagttcacagataaggacaaggacaacgtcgcccccaggagcaagatcagcccccagggctacggccgccggcgccggcgctccctgcccgaggccggcccgggtcggactctggtgtcttctaagccacaagcacacggggctccagcccccccgagtggaagtgctccccactttctttaggatttaggcgcccatggtacaaggaatagtcgcgcaagcatcccgctggtgcctcccgggacgaaggacttcccgagcggtgtggggaccgggctctgacagccctgcggagaccctgagtccgggaggcaccgtccggcggcgagctctggctttgcaagggcccctccttctgggggcttcgcttccttagccttgctcaggtgcaagtgccccagggggcggggtgcagaagaatccgagtgtttgccaggcttaaggagaggagaaactgagaaatgaatgctgagacccccggagcaggggtctgagccacagccgtgctcgcccacaaactgatttctcacggcgtgtcaccccaccagggcgcaagcctcactattacttgaactttccaaaacctaaagaggaaaagtgcaatgcgtgttgtacatacagaggtaactatcaatatttaagtttgttgctgtcaagattttttttgtaacttcaaatatagagatatttttgtacgttatatattgtattaagggcattttaaaagcaattatattgtcctccccctattttaagacgtgaatgtctcagcgaggtgtaaagttgttcgccgcgtggaatgtgagtgtgtttgtgtgcatgaaagagaaagactgattacctcctgtgtggaagaaggaaacaccgagtctctgtataatctatttacataaaatgggtgatatgcgaacagcaaaccaaaaaaaaaaaaaaaaaaaaaaaaaaaaaaaaaa

SEQ ID NO: 923 - DNA, 3457 bp, Homo sapiens
agtggcttagacctagaaaagaatcgtgacgggcaggaaaccattacaccaccacctgggctgtgctctccggctcccgccgccacccccgccctcgccttcgcctccgcctccggtgcacattaaagatccaaagtcatgactgactccaagtatttcacaaccaataaaaaaggagaaatatttgaactaaaagctgaactcaacaatgaaaagaaagaaaagagaaaggaggctgtgaagaaagtgattgctgctatgaccgtggggaaggatgttagcacataaagcacatttggtttttaaattgctgtcctgtgaccatctatctaaggagttggcaaacgtttttgtaaaggacaaaatattctctctttccagacgtagtgaactgtatgcagactgacaatctggaactaaagaagcttgtgtatctctacttgatgaactacgccaagagtcagccagacatggccatcatggctgtaaacagctttgtgaaggactgtgaagatcctaatcctttgattcgagccttggcagtcagaaccatggggtgcatccgggtagacaaaattacagaatatctctgtgagccgctccgcaagtgcttgaaggatgaggatccctatgttcggaaaacagcagcagtctgcgtggcaaaactccatgatatcaatgcccaaatggtggaagatcagggatttctggattctctacgggatctcatagcagattcaaatccaatggtggtggctaatgccgtagcggcattatctgaaatcagtgagtctcacccaaacagcaacttacttgatctgaacccacagaacattaataagctgctgacagccctgaatgaatgcactgaatggggccagattttcatcctggactgcctgtctaattacaaccctaaagatgatcgggaggctcagagcatctgtgagcgggtaactccccggctatcccatgccaactcagcagtggtgctttcagcggtaaaagtcctaatgaagtttctagaattgttacctaaggattctgactactacaatatgctgctgaagaagttagcccctccacttgtcactttgctgtctggggagccagaagtgcagtatgtcgccctgaggaacatcaacttaattgtccagaaaaggcctgaaatcttgaagcaggaaatcaaagtcttctttgtgaagtacaatgatcccatctatgttaaactagagaagttggacatcatgattcgtttggcatctcaagccaacattgctcaggttctggcagaactgaaagaatatgctacagaggtggatgttgactttgttcgaaaagctgtgcgggccattggacggtgtgccatcaaggtggagcaatctgcagagcgctgtgtaagcacattgcttgatctaatccagaccaaagtgaattatgtggtccaagaagcaattgttgtcatcagggacatcttccgcaaataccccaacaagtatgaaagtatcatcgccactctgtgtgagaacttagactcgctggatgagccagatgctcgagcagctatgatttggattgtgggagaatatgctgaaagaattgacaatgcagatgagttactagaaagcttcctggagggttttcacgatgaaagcacccaggtgcagctcactctgcttactgccatagtgaagctgtttctcaagaaaccatcagaaacacaggagctagtccagcaggtcttgagtttggcaacacaggattctgataatcctgaccttcgagaccggggctatatttattggcgccttctctcaactgaccctgttacagctaaagaagtagtcttgtctgagaagccactgatctctgaggagacggaccttattgagccaactctgctggatgagctaatctgccacattggttctttggcctctgtgtatcataagcctcccaatgcttttgtggaaggaagtcatggaattcatcgtaaacacttgccaattcatcatgggagcactgatgcaggtgacagccctgttggcactaccactgcaacgaacctggaacagcctcaggttatcccctctcaaggtgatcttctaggggatcttttaaaccttgacctcggtcccccagtcaatgtgccacaggtgtcctccatgcagatgggagcagtggatctcctaggaggaggactagatagtctggtgggacaatccttcatcccatcatcggtccctgcaacctttgctccttcacctacacctgctgtggtcagcagtggactgaatgacctgtttgaactctccacagggataggcatggcacctggtggatatgtggctcctaaggctgtctggctacctgcagtaaaggctaaaggcttggagatttccggaacatttactcaccgccaagggcacatctatatggaaatgaacttcaccaataaagctctgcagcacatgacagattttgcaatccagtttaacaaaaatagctttggtgtcatccccagcactcctctggccatccatacaccactgatgccaaaccagagcattgatgtctccctgcctctcaataccttgggcccagtcatgaagatggaacctctgaataacctccaggtggctgtgaaaaacaatatcgatgtcttctacttcagctgcctcatcccactcaatgtgctttttgtagaagatggcaaaatggagcgccaggtcttccttgcaacatggaaggatattcccaatgaaaatgaacttcagtttcagattaaggaatgtcatttaaatgctgacactgtttccagcaagttgcaaaacaacaatgtttatactattgccaagaggaatgtggaagggcaggacatgctgtaccaatccctgaagctcactaatggcatttggattttggccgaactacgtatccagccaggaaaccccaattacacgctgtcactgaagtgtagagctcctgaagtctctcaatacatctatcaggtctacgacagcattttgaaaaactaacaagactggtccagtacccttcaaccatgctgtgatcggtgcaagtcaagaactcttaactggaagaaattgtattgctgcgtagaatctgaacacactgaggccacctagcaaggtagtaactagtctaacctgtgctaacattagggcacaacctgttggatagttttagcttcctgtgaacatttgtaaccactgcttcagtcacctcccacctcttgccacctgctgctgctatctgtccttacttgtgggcttctccatgctgtgccaatggctggctttttctacaccctcttttgagtgtagtttggtattttgtaattgagagctcatttcaaaagcagaaaaagacaacaaatattaaagcaaggaaaagtgtaactgaaataaaaaaaaaaaaaaaaaaaaaaaaaaaa

SEQ ID NO: 924 - DNA, 1077 bp, Homo sapiens
gacgggccggatcgccttcgccgccgcccgcccgcaaaccttcgtgcccggcccgtcctcgcccccgcctccgccaccgcctcggcccgcagagcttgccccctccccacccgcagacatgtccgagtccaagagcggccccgagtatgcttcgtttttcgccgtcatgggcgcctcggccgccatggtcttcagcgccctgggcgctgcctatggcacagccaagagcggtaccggcattgcggccatgtctgtcatgcggccggagcagatcatgaagtccatcatcccagtggtcatggctggcatcatcgccatctacggcctggtggtggcagtcctcatcgccaactccctgaatgacgacatcagcctctacaagagcttcctccagctgggcgccggcctgagcgtgggcctgagcggcctggcagccggctttgccatcggcatcgtgggggacgctggcgtgcggggcaccgcccagcagccccgactattcgtgggcatgatcctgattctcatcttcgccgaggtgctcggcctctacggtctcatcgtcgccctcatcctctccacaaagtagaccctctccgagcccaccagccacagaatattatgtaaagaccacccctcctcattccagaacgaacagcctgacacatacgcacggggccgccgcccccagtagttggtcttgtacatgcgcagtgtcctagtgcccatcgtctgtttccccggccttgcccccgcccgccccgtgccgtggacatctgggcccactcatcgcccctccaggcccccggcgccccaccccctagagtgctctgtgtatgcggatgatttagaattgtcatttctctttactggatgtttatttataaagatctggcctgttcctgcgtctgcggagcggcccttgtctcccagctatctataaccttagctagagtgtcgccttgtgggttcctgttgctgagacttcctggatggagccgccctcaccgccgggcccgtggccctgcgcggagctgtgtccaataaagttcttggatgtgaaaaaaaaaaaaaaaaaaa

SEQ ID NO: 925 - DNA, 1665 bp, Homo sapiens
cagcgtcagctgacctggggagtcgcgattcgtgccggccggtcctggttctccggtcccgccgctcccgcagcagccatgtcgttcttcccggagctttactttaacgtggacaatggctacttggagggactggtgcgcggcctgaaggccggggtgctcagccaggccgactacctcaacctggtgcagtgcgagacgctagaggacttgaaactgcatctgcagagcactgattatggtaacttcctggccaacgaggcatcacctctgacggtgtcagtcatcgatgaccggctcaaggagaagatggtggtggagttccgccacatgaggaaccatgcctatgagccactcgccagcttcctagacttcattacttacagttacatgatcgacaacgtgatcctgctcatcacaggcacgctgcaccagcgctccatcgctgagctcgtgcccaagtgccacccactaggcagcttcgagcagatggaggccgtgaacattgctcagacacctgctgagctctacaatgccattctggtggacacgcctcttgcggcttttttccaggactgcatttcagagcaggaccttgacgagatgaacatcgagatcatccgcaacaccctctacaaggcctacctggagtccttctacaagttctgcaccctactgggcgggactacggctgatgccatgtgccccatcctggagtttgaagcagaccgccgcgccttcatcatcaccatcaattctttcggcacagagctgtccaaagaggaccgtgccaagctctttccacactgtgggcggctctaccctgagggcctggcgcagctggctcgggctgacgactatgaacaggtcaagaacgtggccgattactacccggagtacaagctgctcttcgagggtgcaggtagcaaccctggagacaagacgctggaggaccgattctttgagcacgaggtaaagctgaacaagttggccttcctgaaccagttccactttggtgtcttctatgccttcgtgaagctcaaggagcaggagtgtcgcaacatcgtgtggatcgctgaatgtatcgcccagcgccaccgcgccaaaatcgacaactacatccctatcttctagcgtcctggcccaaggctctcaattgcactctttgtgtgtgtgtgtgtgtgtgtgcgcgtgtgtgtgcgtgtgtgtgtatgtggtctgtgacaagcctgtggctcacctgcctgtccggggtgtagtacgctgtcctagcggctgcccagttctcctgaccctcttagagactgttcttaggcctgaaaaggggctgggcacccccccccaccaaggatggacgaagaccccctccagagcaaggaggccccctcagccctgtggttacagccgctgatgtatctaagaagcatgtcactttcatgttcctccctaactccctgacctgagaaccctggggcctgggggcagtttgagcctcctctcccttctgtgggtcgctcccagagccatggcccatgggaaggacagagtgtgtgtgtccttggggcctggggggatgttgctcctcagctccctccctcagccctgcccctctgagacaataaaactgccctctctaaggcaaaaaaaaaaaaaaaaaaaaaaaaa

SEQ ID NO: 926 - DNA, 1456 bp, Homo sapiens
cctgctcgggcgcgggcggcggcgcggccatgaagctgaagctgaagaacgtgtttctcgcctacttcctggtgtcgatcgccggcctcctctacgcgctggtacagctcggccagccatgtgactgccttcctcccctgcgggcagcagccgagcagctacggcagaaggatctgaggatttcccagctgcaagcggaactccgacggccaccccctgcccctgcccagccccctgaacccgaggccctgcctactatctatgttgttacccccacctatgccaggctggtacagaaggcagagctggtacgactgtcccagacactgagcctggtgccccggctgcattggctgctggtggaggatgctgagggtcccaccccgctggtctcagggctgctggctgcctctggcctcctcttcacacacctggtggtcctcacgcccaaagcccagcggcttcgggagggcgagcctggctgggttcatccccgtggtgtcgagcagcggaacaaggccctggactggctccggggcagagggggtgctgtgggtggggagaaggacccaccaccaccagggacccaaggagtcgtttactttgctgacgatgacaacacctacagccgggagctgtctgaggagatgcgctggacccgtggtgtctcagtgtggcctgtggggctggtgggcggcctgcgattcgagggccctcaggtacaggacggccgggtagtgggcttccacacagcatgggagcccagcaggcccttccctgtggatatggctggatttgccgtggccctgcccttgctgttagataagcccaatgcccaatttgattccaccgctccccggggccacctggagagcagtcttctgagccaccttgtggatcccaaggacctggagccacgggctgccaactgcactcgggtactggtgtggcatactcggacagagaagcccaagatgaagcaggaggagcagctgcagcggcagggccggggctcagacccagcaattgaggtgtgatggcggccccaccccaactaccacctcttttcaggcacagaccttgtgggactgggccccaggcctgcccaggatgtggttttccaagtcctgacccttggagccagaagtggcccctctgcccctccaggcccagggcatggtcctgctgcttcacccctcccctagcctgccgtgtggcactgcccacaggctggggacaagcagcccttgtgttgagtcaggttggccctgtttagggtggaacagaaggacagatgggcccaggagggagggcagctgagtaactgggtaacttattggggctgggcatgcactggggggctggaggagctgggctggacccttcccacctgagcatgctgacccccttcctacctccagaataaagaatttcaacctggaaaaaaaaaaaaaaa

SEQ ID NO: 927 - DNA, 1727 bp, Homo sapiens
gccatggccaccacggtgacctgcacccgcttcaccgacgagtaccagctctacgaggatattggcaagggggctttctctgtggtccgacgctgtgtcaagctctgcaccggccatgagtatgcagccaagatcatcaacaccaagaagctgtcagccagagatcaccagaagctggagagagaggctcggatctgccgccttctgaagcattccaacatcgtgcgtctccacgacagcatctccgaggagggcttccactacctggtcttcgatctggtcactggtggggagctctttgaagacattgtggcgagagagtactacagcgaggctgatgccagtcactgtatccagcagatcctggaggccgttctccattgtcaccaaatgggggtcgtccacagagacctcaagccggagaacctgcttctggccagcaagtgcaaaggggctgcagtgaagctggcagacttcggcctagctatcgaggtgcagggggaccagcaggcatggtttggtttcgctggcacaccaggctacctgtcccctgaggtccttcgcaaagaggcgtatggcaagcctgtggacatctgggcatgtggggtgatcctgtacatcctgctcgtgggctacccacccttctgggacgaggaccagcacaagctgtaccagcagatcaaggctggtgcctatgacttcccgtcccctgagtgggacaccgtcactcctgaagccaaaaacctcatcaaccagatgctgaccatcaaccctgccaagcgcatcacagcccatgaggccctgaagcacccgtgggtctgccaacgctccacggtagcatccatgatgcacagacaggagactgtggagtgtctgaaaaagttcaatgccaggagaaagctcaagggagccatcctcaccaccatgctggccacacggaatttctcagtgggcagacagaccaccgctccggccacaatgtccaccgcggcctccggcaccaccatggggctggtggaacaagccaagagtttactcaacaagaaagcagatggagtcaagccccagacgaatagcaccaaaaacagtgcagccgccaccagccccaaagggacgcttcctcctgccgccctggagcctcaaaccaccgtcatccataacccagtggacgggattaaggagtcttctgacagtgccaataccaccatagaggatgaagacgctaaagcccggaagcaggagatcattaagaccacggagcagctcatcgaggccgtcaacaacggtgactttgaggcctacgcgaaaatctgtgacccagggctgacctcgtttgagcctgaagcactgggcaacctggttgaagggatggacttccacagattctacttcgagaacctgctggccaagaacagcaagccgatccacacgaccatcctgaacccacacgtgcacgtcattggagaggatgccgcctgcatcgcttacatccggctcacgcagtacattgacgggcagggccggccccgcaccagccagtctgaggagacccgcgtgtggcaccgccgcgacggcaagtggcagaacgtgcacttccactgctcgggcgcgcctgtggccccgctgcagtgaagagctgcgccctggtttcgccggacagagttggtgtttggagcccgactgccctcgggcacacggcctgcctgtcgcatgtttgtgtctgcctc

SEQ ID NO: 928 - DNA, 2567 bp, Homo sapiens
gctccagcccggcccgacccgaccgcacccggcgcctgccctcgctcggcgtccccggccagccatgggcccttggagccgcagcctctcggcgctgctgctgctgctgcaggtctcctcttggctctgccaggagccggagccctgccaccctggctttgacgccgagagctacacgttcacggtgccccggcgccacctggagagaggccgcgtcctgggcagagtgaattttgaagattgcaccggtcgacaaaggacagcctatttttccctcgacacccgattcaaagtgggcacagatggtgtgattacagtcaaaaggcctctacggtttcataacccacagatccatttcttggtctacgcctgggactccacctacagaaagttttccaccaaagtcacgctgaatacagtggggcaccaccaccgccccccgccccatcaggcctccgtttctggaatccaagcagaattgctcacatttcccaactcctctcctggcctcagaagacagaagagagactgggttattcctcccatcagctgcccagaaaatgaaaaaggcccatttcctaaaaacctggttcagatcaaatccaacaaagacaaagaaggcaaggttttctacagcatcactggccaaggagctgacacaccccctgttggtgtctttattattgaaagagaaacaggatggctgaaggtgacagagcctctggatagagaacgcattgccacatacactctcttctctcacgctgtgtcatccaacgggaatgcagttgaggatccaatggagattttgatcacggtaaccgatcagaatgacaacaagcccgaattcacccaggaggtctttaaggggtctgtcatggaaggtgctcttccaggaacctctgtgatggaggtcacagccacagacgcggacgatgatgtgaacacctacaatgccgccatcgcttacaccatcctcagccaagatcctgagctccctgacaaaaatatgttcaccattaacaggaacacaggagtcatcagtgtggtcaccactgggctggaccgagagagtttccctacgtataccctggtggttcaagctgctgaccttcaaggtgaggggttaagcacaacagcaacagctgtgatcacagtcactgacaccaacgataatcctccgatcttcaatcccaccacgggcttggattttgaggccaagcagcagtacattctacacgtagcagtgacgaatgtggtaccttttgaggtctctctcaccacctccacagccaccgtcaccgtggatgtgctggatgtgaatgaagcccccatctttgtgcctcctgaaaagagagtggaagtgtccgaggactttggcgtgggccaggaaatcacatcctacactgcccaggagccagacacatttatggaacagaaaataacatatcggatttggagagacactgccaactggctggagattaatccggacactggtgccatttccactcgggctgagctggacagggaggattttgagcacgtgaagaacagcacgtacacagccctaatcatagctacagacaatggttctccagttgctactggaacagggacacttctgctgatcctgtctgatgtgaatgacaacgcccccataccagaacctcgaactatattcttctgtgagaggaatccaaagcctcaggtcataaacatcattgatgcagaccttcctcccaatacatctcccttcacagcagaactaacacacggggcgagtgccaactggaccattcagtacaacgacccaacccaagaatctatcattttgaagccaaagatggccttagaggtgggtgactacaaaatcaatctcaagctcatggataaccagaataaagaccaagtgaccaccttagaggtcagcgtgtgtgactgtgaaggggccgccggcgtctgtaggaaggcacagcctgtcgaagcaggattgcaaattcctgccattctggggattcttggaggaattcttgctttgctaattctgattctgctgctcttgctgtttcttcggaggagagcggtggtcaaagagcccttactgcccccagaggatgacacccgggacaacgtttattactatgatgaagaaggaggcggagaagaggaccaggactttgacttgagccagctgcacaggggcctggacgctcggcctgaagtgactcgtaacgacgttgcaccaaccctcatgagtgtcccccggtatcttccccgccctgccaatcccgatgaaattggaaattttattgatgaaaatctgaaagcggctgatactgaccccacagccccgccttatgattctctgctcgtgtttgactatgaaggaagcggttccgaagctgctagtctgagctccctgaactcctcagagtcagacaaagaccaggactatgactacttgaacgaatggggcaatcgcttcaagaagctggctgacatgtacggaggcggcgaggacgactaggggactcgagagaggcgggccccagacccatgtgctg

SEQ ID NO: 929 - DNA, 1984 bp, Homo sapiens
  misc_feature (9)..(9): n is a, c, g, or t
  misc_feature (17)..(18): n is a, c, g, or t
  misc_feature (33)..(33): n is a, c, g, or t
  misc_feature (41)..(41): n is a, c, g, or t
  misc_feature (49)..(50): n is a, c, g, or t
  misc_feature (52)..(52): n is a, c, g, or t
  misc_feature (54)..(54): n is a, c, g, or t
  misc_feature (62)..(62): n is a, c, g, or t
  misc_feature (80)..(80): n is a, c, g, or t
  misc_feature (84)..(84): n is a, c, g, or t
  misc_feature (127)..(127): n is a, c, g, or t
  misc_feature (157)..(157): n is a, c, g, or t
  misc_feature (159)..(159): n is a, c, g, or t
  misc_feature (175)..(175): n is a, c, g, or t
  misc_feature (207)..(209): n is a, c, g, or t
  misc_feature (214)..(214): n is a, c, g, or t
  misc_feature (1181)..(1181): n is a, c, g, or t
agcttcagncatcactnncatctttatcaatgnccttgggnccacaggnngngnccttctgnccaaacagcagccaatgnaggnatcttaaaaggcacatcactttatatttattcagtggttatgncatcacttaatcctcaccacaaccttgtgngntcagtacaatttgtgntttcattttatctgtgaacaaatggaggcagnnntttgngtaatttacaagtaagtggcagatccgggggctgtgcctagacaatgtggctccagactccttgcccctccctgccttctgctgcatcttgattgagtctagccatctatttctttaacacacactaattgctgtctccatgttccaggccctgtgccagatgctagaaatacatccccatccactggatcttggcatggtccattgctcagtgtcctgctatgttacgtgttacataatgcatttattccggtatttagcccatggaaaataatgctgaaagacattgtatgcatgtttctacaacaaaactatgtaacttatgtttcttttattgctttggctatcaggaagctcttatccaaatcagagcaaatacattagaatttgggcttgtcatttcagtttgctgaacttttccttctggcccagattttctattttggttcataaattctattgcacaaatgtcctttattgtaaaacaccttaaattctttctaagggaaggctgcatggaaatgatacagtaaggtcttccctgcattttcttagattcctattagggaaggcagacctagatgtccctcttaccctcagtcccaaagccccccatttataaaatcccttaagcagtgactactgctgttctgagtacctggaggtagttcagagcttctgaaaggtaaaatccatatacaaaaagaagttccttccgatccagatcccagctttggtgccagatgcacatttgaggagtaggtggctagtcagactctcacctgagcagttaataaaatctattgccccttaatggaattttttctgcaagctcgaattgatctgtcatctttgtgatttgtgagatggcagggaagcaccaaacaccatcatgacttgggccacagtggtgggaaaaaaggaaaaaagaaaaaaaaaatccactgccaagccttgccaggcgtanaaagggctggaactgctggggccattttatctgatttattggaaatagagtggatcttattaacattttaataaagagaatctttttgcactaggctggaagtggccgccagtcccccgtgcaattccattctctggaaaagtggaatcagctggcattgcccagcgtgatttgtgaggctgagccccaacagtccaaagaagcaaatgggatgccacctccgcggggctcgctcctcgcgaggtgctcaccccgtatctgccatgcaaaacgagggagcgttaggaaggaatccgtcttgtaaagccattggtcctggtcatcagcctctacccaatgctttcgtgatgctgctgctgatctatttgggaagttggctggctggcgaggcagagcctctcctcaaagcctggctcccacggaaaatatgctcagtgcagccgcgtgcatgaatgaaaacgccgccgggcgcttctagtcggacaaaatgcagccgagaactccgctcgttctgtgcgttctcctgtcccaggtagggaagaggggctgccgggcgcgctctgcgccccgtttctgcattcggatcgcccggcacgggcagggtgagggggctttcggggggtcggggcctccggtcgcggcggcgaagacagatcggggctcggtagggaggtcattccgagcccagagatcctaggcaccccccacacacaggctcccactctggcgtgcgtgcgtgtgtgtgtgtgtgtgtgtgtgtgtgtgtgtgtgtgtgtgtgtgtgtacgttcgttaacgggagga

SEQ ID NO: 930 - DNA, 2165 bp, Homo sapiens
tcggtgaacgatgaagggccggcggcggcgacgccgagagtactgcaagttcgcgctgctgttggtgctgtacacgctggtgctgttgctcgtcccctccgtattggacggcggccgcgacggggacaagggcgccgagcactgccccggcctgcagcgcagcctgggagtgtggagcctggaggcggcggcggccggcgaacgcgagcagggagcggaggcgcgggccgccgaggaagggggcgcgaaccagtctcctcggttcccaagcaacctcagcggcgctgtcggggaggcagtgtctcgcgagaagcagcacatctacgtgcatgccacctggcgcaccggctcgtccttcctgggcgaactctttaaccagcacccggacgttttctacttgtatgagcccatgtggcatctatggcaggcgctgtatccgggcgacgccgagagcttgcagggcgcgctgcgcgacatgctgcgttcgctcttccgctgcgacttctccgtgctgcggctgtacgcgccgccgggggaccccgctgcgcgcgccccggacacggccaatcttaccacggccgccctcttccgctggcggactaacaaggtcatctgctcgccgccactgtgtcctggcgcaccccgtgcccgggccgaggtgggcctcgtcgaggacaccgcctgcgagcgcagctgcccacccgtggcgatacgcgccctggaggccgagtgccgaaagtacccggtggtggtcatcaaggacgtgcgcctgctcgatctgggcgtgctggtgcccctgttgcgtgatccaggcctcaacctgaaggtggtgcagcttttccgcgacccgagggcggtgcacaactcgcgcctcaagtctaggcagggactgctgcgcgagagcatccaggtgctgcgcacccgccagaggggcgaccgcttccaccgtgtgctgctggcgcacggcgtgggtgctcgccccgggggccagtctcgcgcgctgcccgccgcgccgcgcgccgatttcttcctgaccggtgcgctcgaggtgatctgcgaagcctggctgcgcgatctgcttttcgcgcgcggcgcgcccgcctggctgcggcgccgctacctgaggctgcgctatgaggacctggtgcggcagccacgcgcccagctgcgccgcctgctgcgcttctccgggctacgcgcgctcgcagcgctcgatgccttcgcgctcaacatgactcgcggcgcggcctacggcgccgaccggcccttccacctgtcagcgcgcgacgcccgggaggcggtgcacgcctggcgcgagcgcctgagccgagagcaggtgcgccaggtggaggtcgcctgcgctccagccatgcgtctgctcgcctaccctcgcagcggagaggagggcgacgcggagcagcccagggaaggggagacgccgctggagatggatgccgacggcgccacgtagcctcccatccctgtccccggcacggatccgggtcagtcaccacgaacaggggcactcggcatgctgccccagcactggagaagcagcgctgtgggggcaatctgtcacactctcagagtctgggacttgacttgctaccaacaactgctgtgcaattctgctgagcaggaatatcatgagctgttcaataatgacggacgcattggttgagatgaagtttccagtaaggaagtgacagtgcaatgtggatatttatggctgtaaaataggaagagctttagttcccaggctgaacctgccactgctggagccatttcaacaaggcatcctcacaacaaagaagagatgtgatttggtaccatttcacaccagcaggtgtctggacgaaaacatcaatgtgaataagggccaagtgcagtcctgtcttgattaaattacttaataatattattaaataataataggtctgggcagtattgtttttaacctgactcatccagctgtccttcaaatagctccgtctccctctacccagaactgatttttaaaaagaagtaatttttctccctgggctgggaaaaccctaatgaactgaaacacacttttactttaaaatttttctgtctggcgtttttgtaatcatactattaaatgactctggagtcatgttaatgaaaaaaaaaaaaaaaaaaaa

SEQ ID NO: 931 - DNA, 1441 bp, Homo sapiens
gtgcgctcagcaggacgtgggaggctccggcttcaaggtcgacactcatccaagaggaaggatggccagtatcttttctaagttgctaactggccgcaatgcttctctgctgtttgctaccatgggcaccagtgtcctgaccaccgggtacctgctgaaccggcagaaagtgtgtgccgaggtccgggagcagcctaggctatttcctccaagcgcaagcacaacaactgcatggccgagtgcctcacccccgccatttatgccaagcttcgcaacaaggtgacacccaacggctacacgctggaccagtgcatccagactggagtggacaaccctggccaccccttcataaagactgtgggcatggtggctggtgacgaggagtcctatgaggtgtttgctgacctttttgaccccgtcatcaaactaagacacaacggctatgaccccagggtgatgaagcacacaacggatctggatgcatcaaagatcacccaagggcagttcgacgagcattacgtgctgtcttctcgggtgcgcactggccgcagcatccgtgggctgagcctgcctccagcctgcacccgggccgagcgaagggaggtagagaacgtggccatcactgccctggagggcctcaagggggacctggctggccgctactacaagctgtccgagatgacggagcaggaccagcagcggctcatcgatgaccactttctgtttgataagccagtgtcccctttattaacatgtgctgggatggcccgtgactggccagatgccaggggaatctggcataattatgataagacatttctcatctggataaatgaggaggatcacaccagggtaatctcaatggaaaaaggaggcaatatgaaacgagtatttgagcgattctgtcgtggactaaaagaagtagaacggttaatccaagaacgaggctgggagttcatgtggaatgagcgcctaggatacattttgacctgtccttcgaaccttggaacaggactacgagctggtgtccacgttaggatcccaaagctcagcaaggacccacgcttttctaagatcctggaaaacctaagactccagaagcgtggcacaggtggtgtggacactgccgcggtcgcagatgtgtacgacatttccaacatagatagaattggtcgatcagaggttgagcttgttcagatagtcatcgatggagtcaattacctggtggattgtgaaaagaagttggagagaggccaagatattaaggtgccaccccctctgcctcagtttggcaaaaagtaaactttccctttcccaatttataaataatctgtctgcgggtacgacagacataaatctctactctgagagtttttatacacttggaaaaatataaaattgtagatcctgcctatctttacaataaaactctccttaatat

SEQ ID NO: 932 - DNA, 1043 bp, Homo sapiens
gaagtcctctgagcagagaggttaattcatcttgctgtaaaacaaaatagaaaataagttcccctcaataagtgaacgtaatacaaagtcaaatgtggttggtgccagaggccaggaagaagttcttgtgagaataggtgcagagaagagctaggccctggctgagtttaaaccttgacttagtcactgtgggactctgggtgagttactccatggattgatggctgggtcatggagataatagtacctaattcatacaggtactgtgagaagtaaatggaatatttcacgttaagtgtttaacggtgcgtttaaatgctaggtgctattattattaatttttaaattaactttgccatgttttgtgtcttcccctctctgtgcttcctttctttagtatgagccgcacagcctacacggtgggagccctgcttctcctcttggggaccctgctgccggctgctgaagggaaaaagaaagggtcccaaggtgccatccccccgccagacaaggcccagcacaatgactcagagcagactcagtcgccccagcagcctggctccaggaaccgggggcggggccaagggcggggcactgccatgcccggggaggaggtgctggagtccagccaagaggccctgcatgtgacggagcgcaaatacctgaagcgagactggtgcaaaacccagccgcttaagcagaccatccacgaggaaggctgcaacagtcgcaccatcatcaaccgcttctgttacggccagtgcaactctttctacatccccaggcacatccggaaggaggaaggttcctttcagtcctgctccttctgcaagcccaagaaattcactaccatgatggtcacactcaactgccctgaactacagccacctaccaagaagaagagagtcacacgtgtgaagcagtgtcgttgcatatccatcgatttggattaagccaaatccaggtgcacccagcatgtcctaggaatgcagacccaggaagtcccagacctaaaacaaccagattcttacttggcttaaacc

SEQ ID NO: 933 - DNA, 1364 bp, Homo sapiens
aggggactggggccaagagccgggagcgcgggcgcaaaggcaccagggcccgcccagggcgccgcgcagcacggccttgggggttctgcgggccttcgggtgcgcgtctcgcctctagccatggggtccgcagcgttggagatcctgggcctggtgctgtgcctggtgggctgggggggtctgatcctggcgtgcgggctgcccatgtggcaggtgaccgccttcctggaccacaacatcgtgacggcgcagaccacctggaagggcctgtggatgtcgtgcgtggtgcagagcaccgggcacatgcagtgcaaagtgtacgactcggtgctggctctgagcaccgaggtgcaggcggcgcgggcgctcaccgtgagcgccgtgctgctggcgttcgttgcgctcttcgtgaccctggcgggcgcgcagtgcaccacctgcgtggccccgggcccggccaaggcgcgtgtggccctcacgggaggcgtgctctacctgttttgcgggctgctggcgctcgtgccactctgctggttcgccaacattgtcgtccgcgagttttacgacccgtctgtgcccgtgtcgcagaagtacgagctgggcgcagcgctgtacatcggctgggcggccaccgcgctgctcatggtaggcggctgcctcttgtgctgcggcgcctgggtctgcaccggccgtcccgacctcagcttccccgtgaagtactcagcgccgcggcggcccacggccaccggcgactacgacaagaagaactacgtctgagggcgctgggcacggccgggcccctcctgccagccacgcctgcgaggcgttggataagcctggggagccccgcatggaccgcggcttccgccgggtagcgcggcgcgcaggctcctcggaacgtccggctctgcgccccgacgcggctcctggatccgctcctgcctgcgcccgcagctgaccttctcctgccactagcccggccctgcccttaacagacggaatgaagtttccttttctgtgcgcggcgctgtttccataggcagagcgggtgtcagactgaggatttcgcttcccctccaagacgctgggggtcttggctgctgccttacttcccagaggctcctgctgacttcggaggggcggatgcagagcccggggcccccaccggaagatgtgtacagctggtctttactccatcggcaggcccgagcccagggaccagtgacttggcctggacctcccggtctcactccagcatctccccaggcaaggcttgtgggcaccggagcttgagagagggcgggagtgggaaggctaagaatctgcttagtaaatggtttgaactctcaaaaaaaaaaaaaaaa

SEQ ID NO: 934 - DNA, 2489 bp, Homo sapiens
gcacgagggggtagagggaaaagagctccgggccaggggctgccgtcgccgccgtcggggagtcagcccgccagcccgccagctcgtcagcccgccaccagcttcgcgggccctgtcggtcccggtaagcgggcctgcgcttaccggaaagaggagcgtaagatgaaagagtatcagaccaaacattgtctggcttgcactgtaaaactagttagctgaagacgacttctcaggtttcttcaggatgcctgcagcacttgtggagaatagccaggttatctgtgaagtgtgggccagtaatctagaagaagagatgaggaagatccgagaaatcgtgcccagttacagttatattgccatggacacagaatttccaggtgttgtggtgcgaccaattggtgaatttcgtagttccatagattaccaatatcagcttctgcggtgcaatgttgaccttttaaaaattatccagctgggccttacattcacaaatgagaagggagagtatccttctggaatcaatacttggcagttcaatttcaaatttaaccttacagaggacatgtactcccaggattccatagatctccttgctaactcaggactacagtttcagaagcatgaagaggaagggattgacacactgcactttgcagagctgcttatgacatcaggagtggttctctgtgacaatgtcaaatggctttcatttcatagtggctatgattttggctatatggtaaagttgcttacagattctcgtttgccagaagaggaacatgaattcttacatattctgaaccttttctccccatccatttatgatgtgaaatacctgatgaagagctgcaaaaatcttaagggaggtcttcaggaagttgctgatcagttggatttgcagaggattggaaggcagcaccaggcaggctcagactcactgctgacaggaatggctttctttaggatgaaagagttgttttttgaggacagcattgatgatgccaagtactgtgggcggctctatggcttaggcacaggagtggcccagaagcagaatgaggatgtggactctgcccaggagaagatgagcatcctggcgattatcaacaacatgcagcagtgatggcgccaggctctgcagggtgggcctgatcccagagtggtgcttactgtgctgactgtgtacttatcttccccaagagaaaatgcttcttttgagcacactgtacctaccatctgcattgagcagaaagacttttgttttactgaagacaaaagatgtttttattttagacccagaagagaggagtttgctctgaatttgtaaataagtcttccccattcctcatactcgagcctctcctctctggttgcctcctgccaccagcatccatggctcatttgacacctttttaaatatcaggacaagtctgaaacaaagtagtaaaatgtatataactcttacctgttgtcattctttttcttttaaatttgttgctaatctctgataatgaagattcttactctgattctcagctgagctgtgagggcttccagggaaaatggaacaaaatggtgttcttaggtaatgggttgtagatactgagtcttcctttccttttctgacccttctcgaggacatttgctttcctcacacttttgtagtctctctttacatattactatatggaaatgaattgctctgtgctgaaatttgaagaccagataatgaaactgaaaagcaaacaatttttactgaatctgtctaccttcattcatgagaactccagaatgagtgttgaccactgaagcatcttttaagtctgtgttccattgtgccattcaggtttgctgtcacatatgcatcatctgaaatcatttgaaatttttgtacaataaaatatcctggatttgatcctgaaggaaactagtaagatcagatttttgggtcatgtctgttgtattttcagtaatgtgatttcagatggtcatctggattctcccacttctctactccattatttctctacttttccttccagcaaaccttgaaacgtgagggagatggattaatgtgagtaacaggaatgtgtctttaaaaagctagagtggttacatttaatcaggcagtaagataatttgggttcttgagttgttttggagtaatatcccacaactggggtaggaagctcaggacttttttctttaaagctagtcatttcaaaagcatattgtatttttttgaatgactacagtatggacaatttcaaaaaccaaaacccactttggattggtggaagtaaaaactggtaactcactcaagtgaatgaatggtcttgcattttaaaagcttatgggaaactcaatttgaaatgattagaaaatgtcaagtattataagctggtatttaagatgcttgtaaatactatttatgtttttaattttgtaaaataaagatttctttttaaaaaaaaaaaaaaaaaaaaaaa

SEQ ID NO: 935 - DNA, 757 bp, Homo sapiens
agcggagtctccgccttgcgagctcagagtgtgcccgctgcgccgccgctgtccatacctgccgccgccgccaccgccaccatgcccaacttcgccggcacctggaagatgcgcagcagcgagaatttcgacgagctgctcaaggcactgggtgtgaacgccatgctgaggaaagtggccgtagcggctgcgtccaagccgcacgtggagatccgccaggacggggatcagttctacatcaagacatccaccacggtgcgcaccactgagatcaacttcaaggtcggagaaggctttgaggaggagaccgtggacggacgcaagtgcaggagtttagccacttgggagaatgagaacaagatccactgcacgcaaactcttcttgaaggggacggccccaaaacctactggaccagtgagctggccaacgatgaacttatcctgacgtttggcgccgatgacgtggtctgcaccagaatttatgtccgagagtgaaggcagctggcttgctcctactttcaggaagggatgcaggctcccctgaggaatatgtcatagttctgagctgccagtggaccgcccttttcccctaccaatattaggtgatcccgttttccccatgacaatgttgtagtgtcccacaccaccaccccccaggccttggtgcctcttgtatccctagtgctccatagtttggcatttgcacggtttcgaagtcattaaactggttagacgtgtcgcaaaaaaaaaaaaaaaa

SEQ ID NO: 936 - DNA, 1712 bp, Homo sapiens
tggagacgccgggcgcatcagcgtcgtccttgttgcttcccgccgcgtccaggcccccgaggaagcgcgaggcgggagaggctggggctgcgacgagcaagcagcgggtcctggacgaggaagagtatatcgagggcctccagacggtcatccaaagggatttctttcctgatgtggagaagctccaggcacagaaggagtacctggaagccgaggagaatggagacttggaacggatgcgccagattgccatcaagtttggctctgccttgggcaagatgtcccgggagcccccgccaccctatgtgactccagccacatttgaaacccctgaggtgcatgcaggcactggagtggtgggcaacaagcccaggccccgcggccgaggcctggaggatggagaggctggagaggaggaggagaaggagccgctgcccagcctagatgtcttcctgagccgctacacgagtgaggacaatgcctccttccaggagatcatggaggtggccaaggagagaagccgggcacgccacgcttggctctaccaggctgaggaagagtttgagaagaggcagaaagataatctcgaactcccgtcagcagagcaccaggccatcgagagcagccaggccagtgtggagacctggaagtacaaggccaagaattccctcatgtactatccagagggtgtccctgacgaggagcagctgtttaagaagccccggcaggtggtacataagaacacgcgcttccttagggaccccttcagccaagccctgagcaggtgccagctccagcaggcagccgccctcaatgcccagcacaaacagggcaaggtgggccccgatggcaaggagctgatcccccaggagtcccctcgagtgggtggatttggatttgttgccactccttcccctgcccctggtgtgaacgagtccccgatgatgacctggggggaggttgagaacacacccttgagagttgaagggtcggaaacgccctacgtggacaggacacccggcccagcttttaagatcctggagccaggccgcagggagcggctgggtctgaagatggccaacgaggccgctgccaagaaccgggccaagaagcaggaagccttgcggagagtgacggagaatctggccagcctcacccccaaaggcctgagcccagccatgtcgccagccctacagcgccttgtgagcaggacggccagcaagtacacagaccgggccctgcgggccagctacacaccatccccagcacgctccacccacctcaagaccccggccagtgggctgcagacccccacaagcacaccggcgcctggctctgccacacgcacccctctcacacaggacccggcctccatcacggacaacctgctgcagctccctgcccggcgcaaagcttcggacttcttttagagccaggcctgggctgggctcatagacgcttcacagagcctgcagggcagctgtacacccagcagaggactccagccttctcggggcccaggcctgggccagaagctgttgaccataccaggagtcactggagaaaggggctgtgctggggccagactggcacaaggcactcgtgcccacaccacaccccagggccttgccaagctgtttgctgtttaattggccccttgaactgtcattaaagaacacctaggtacagtcaaaaaaaaaaaaaaaaaaaaa

SEQ ID NO: 937 - DNA, 2207 bp, Homo sapiens
ccacgcgtccgagcgcgagcgaggtccagcaccatgtgctaggtcactcccagcgcgaggccacacctgggccgtcggagcagcccctcctcacttcaggggtcaccctccccagcacccattgccccaccatggctggggaccggctcccgaggaaggtgatggatgccaagaagctggccagcctgctgcggggcgggcctggggggccgctggtcatcgacagccgctccttcgtggagtacaacagctggcatgtgctcagctccgtcaacatctgctgctccaagctggtgaagcggcggctgcagcagggcaaggtgaccattgcggagctcatccagccggctgcacgcagccaggtggaggctacggagccacaggacgtggtggtctatgaccagagcacgcgggacgccagcgtgctggccgcagacagcttcctctccatcctgctgagcaagctggacggctgcttcgacagcgtggccatcctcactgggggcttcgccaccttctcctcctgcttccccggcctctgcgagggcaagcctgctgccctgctacccatgagcctctcccagccctgcctgcctgtgcccagcgtgggcctgacccgcatcctgcctcacctctacctgggctcgcagaaggacgtcctaaacaaggatctgatgacgcaaaatggaataagctacgtcctcaacgccagcaactcctgccccaagcctgacttcatctgcgagagccgcttcatgcgggtccccatcaacgacaactactgtgaaaaactgctgccctggctggacaagtccatcgagttcatcgataaagccaagctctccagctgccaagtcatcgtccactgtctggctggcatctcccgctctgccaccatcgccatcgcctacatcatgaagaccatgggcatgtcctccgacgacgcctacaggttcgtgaaggacaggcgcccgtccatctcgcccaacttcaacttcctgggccagctgctggagtacgagcgcagcctgaagctgctggccgccctgcagggcgacccgggcaccccctcagggacgccggagcctccgcccagtcctgccgccggggccccgctgccacggctgccaccacctacctcagagagcgctgccacagggaatgcggctgccagggagggcggcctgagcgcgggcggggagccccccgcgccccccacgcccccggcgaccagcgcactgcagcagggcctgcgcggcctgcacctctcctcggaccgcctgcaggacactaaccgcctcaagcgctccttctccctggacatcaagtctgcctacgcccctagcaggcggcccgacggccccgggccccccgaccccggcgaggccccgaagctctgcaagctggacagcccgtcgggggccgcgctgggcctgtcctcgcccagcccggacagcccggacgccgcgcctgaggcgcgcccacggccccgccggcggccccggccccccgccggctcccccgcgcgctcccccgcgcacagcctcggcctgaacttcggcgatgcggcccggcagactccgcggcacggcctctcggccctgtcggcgcccgggctgcccggccctggccagccggccggccccggggcctgggcaccgccgcttgactccccaggcacgccgtcgcccgacgggccctggtgcttcagccccgagggcgcacagggggcgggcggggtgctgtttgcgcccttcggccgggcgggcgccccgggaccaggcggcggcagcgacctgcggcggcgggaggcagcgagggctgagccccgggacgcgcggaccggctggcccgaggagccggccccggagacgcagttcaagcgccgcagctgccagatggagttcgaggagggcatggtggaggggcgcgcgcgcggcgaggagctggccgccctgggcaagcaggcgagcttctcgggcagcgtggaggtcatcgaggtgtcctgacccctccgctgccctcggccccgccgcccgcagccaggcccgttataaatgtatattatatataatgcaaagaaaggtaaatggttttactgggatttttatcgagaagtaaatatttcgattttttatttaaaaaaaaaaaaaaaaaaaaaaaaaaaaaaaaaaaaaaaaaaaaaaaaaaaaaaaaaaaaaaaaaaa

SEQ ID NO: 938 - DNA, 988 bp, Homo sapiens
ggccgggtgcggtaccaacccctgccgcaggactttcctgggccggctcgcggagagcgtagcgcggccttggtggcggaatggcgttgagtgacggcccggccccgccatctggttaaagggactcgttcaacacggaagtgtcccggggctgcattgtgctacagctagaatgaagcacatcaacctatcatttgcagcgtgtggatttctgggcatttaccacttgggggcagcatctgcactttgcagacatggcaaaaaacttgtgaaggatgtcaaagccttcgctggggcgtctgcgggatcgttgggtgcttctgttctgctaacagcaccagaaaaaatagaggaatgtaaccaatttacctacaagtttgccgaagaaatcagaaggcagtctttcggggcagtaacgcccggttatgacttcatggcccgactaagaagtgggatggagtcgattcttcctcccagcgctcacgagctggcccagaaccgactgcacgtatccatcaccaacgccaaaaccagagaaaatcacttagtctccactttttcctccagggagggcctcattaaggtcctcctagccagcagttttgtgcccatttatgcaggactgaagctagtggaatacaaagggcagaagtgggtggacggaggcctcaccaacgctcttcccatcctgcccgtcggccggacagtaaccatctcccccttcagtggacgactggacatctccccgcaggacaaagggcagctagatctgtatgttaatatcgccaagcaggatatcatgttgtccctggcaaacctggtgagactcaaccaagccctttttcccccaagcaagaggaaaatggaatctttgtatcagtgtggttttgatgacactgttaagtttttacttaaagaaaattggtttgaataaaatgcataaaagtttataatgcagaaaaaaaaaaaaaaaaaaaaaaaaaaaaaa

SEQ ID NO: 939 - DNA, 349 bp, Homo sapiens
gtccaccgtatctacccaggtcccaggtctcgaaaaccaaagaagaagaacccgaacaaagaggacaagcggccgcgcacggcctttaccgccgagcagctgcagaggctcaaggccgagttccagaccaacaggtacctgacggagcagcggcgccagagcctggcgcaggagctgagcctcaacgagtcacagatcaagatttggttccagaacaagcgcgccaagatcaagaaggccacgggcaacaagaacacgctggccgtgcacctcatggcacagggcctgtacaaccactccaccacagccaaggagggcaagtcggacagcgagtagggcggggggcatg

SEQ ID NO: 940 - DNA, 2755 bp, Homo sapiens
aattcgccagcggttcaggtggctcttgcctcgatgtcctagcctaggggcccccgggccggacttggctgggctcccttcaccctctgcggagtcatgagggcgaacgacgctctgcaggtgctgggcttgcttttcagcctggcccggggctccgaggtgggcaactctcaggcagtgtgtcctgggactctgaatggcctgagtgtgaccggcgatgctgagaaccaataccagacactgtacaagctctacgagaggtgtgaggtggtgatggggaaccttgagattgtgctcacgggacacaatgccgacctctccttcctgcagtggattcgagaagtgacaggctatgtcctcgtggccatgaatgaattctctactctaccattgcccaacctccgcgtggtgcgagggacccaggtctacgatgggaagtttgccatcttcgtcatgttgaactataacaccaactccagccacgctctgcgccagctccgcttgactcagctcaccgagattctgtcagggggtgtttatattgagaagaacgataagctttgtcacatggacacaattgactggagggacatcgtgagggaccgagatgctgagatagtggtgaaggacaatggcagaagctgtcccccctgtcatgaggtttgcaaggggcgatgctggggtcctggatcagaagactgccagacattgaccaagaccatctgtgctcctcagtgtaatggtcactgctttgggcccaaccccaaccagtgctgccatgatgagtgtgccgggggctgctcaggccctcaggacacagactgctttgcctgccggcacttcaatgacagtggagcctgtgtacctcgctgtccacagcctcttgtctacaacaagctaactttccagctggaacccaatccccacaccaagtatcagtatggaggagtttgtgtagccagctgtccccataactttgtggtggatcaaacatcctgtgtcagggcctgtcctcctgacaagatggaagtagataaaaatgggctcaagatgtgtgagccttgtgggggactatgtcccaaagccttttaagtccatcatctggatacatgcccatgaaccagggtaatcttggggagtcttgccaggagtctgcagtttctgggagcagtgaacggtgcccccgtccagtctctctacacccaatgccacggggatgcctggcatcagagtcatcagaggggcatgtaacaggctctgaggctgagctccaggagaaagtgtcaatgtgtaggagccggagcaggagccggagcccacggccacgcggagatagcgcctaccattcccagcgccacagtctgctgactcctgttaccccactctccccacccgggttagaggaagaggatgtcaacggttatgtcatgccagatacacacctcaaaggtactccctcctcccgggaaggcaccctttcttcagtgggtctcagttctgtcctgggtactgaagaagaagatgaagatgaggagtatgaatacatgaaccggaggagaaggcacagtccacctcatccccctaggccaagttcccttgaggagctgggttatgagtacatggatgtggggtcagacctcagtgcctctctgggcagcacacagagttgcccactccaccctgtacccatcatgcccactgcaggcacaactccagatgaagactatgaatatatgaatcggcaacgagatggaggtggtcctgggggtgattatgcagccatgggggcctgcccagcatctgagcaagggtatgaagagatgagagcttttcaggggcctggacatcaggccccccatgtccattatgcccgcctaaaaactctacgtagcttagaggctacagactctgcctttgataaccctgattactggcatagcaggcttttccccaaggctaatgcccagagaacgtaactcctgctccctgtggcactcagggagcatttaatggcagctagtgcctttagagggtaccgtcttctccctattccctctctctcccaggtcccagccccttttccccagtcccagacaattccattcaatctttggaggcttttaaacattttgacacaaaattcttatggtatgtagccagctgtgcactttcttctctttcccaaccccaggaaaggttttccttattttgtgtgctttcccagtcccattcctcagcttcttcacaggcactcctggagatatgaaggattactctccatatcccttcctctcaggctcttgactacttggaactaggctcttatgtgtgcctttgtttcccatcagactgtcaagaagaggaaagggaggaaacctagcagaggaaagtgtaattttggtttatgactcttaaccccctagaaagacagaagcttaaaatctgtgaagaaagaggttaggagtagatattgattactatcataattcagcacttaactatgagccaggcatcatactaaacttcacctacattatctcacttagtcctttatcatccttaaaacaattctgtgacatacatattatctcattttacacaaagggaagtcgggcatggtggctcatgcctgtaatctcagcactttgggaggctgaggcagaaggattacctgaggcaaggagtttgagaccagcttagccaacatagtaagacccccatctctttaaaaaaaaaaaaaaaaaaaaaaaaaaaa

SEQ ID NO: 941 - DNA, 9535 bp, Homo sapiens
  misc_feature (13)..(14): n is a, c, g, or t
  misc_feature (155)..(156): n is a, c, g, or t
  misc_feature (193)..(195): n is a, c, g, or t
  misc_feature (452)..(453): n is a, c, g, or t
  misc_feature (888)..(888): n is a, c, g, or t
  misc_feature (2384)..(2384): n is a, c, g, or t
cccgaggtttgtnnacttctctaaccccagcttggggaatttccactcagccgctctgggctgagtgggcaggtttccacttgggagcatgggacaggcccgcctgccagccgagctgttatccaccccaggacaggtctggccctgcctccagnntggtctggagggaaaggtgcagagagcctggagtcannnctgtgctcaggggccccagcgccgatctcagcccatcctgataacaaatagcacctcttagacctcctggtctctatttcagccctgagagggctccctgggacgtcatgagtcctcccctcaggacagggagtgttgcaaaggagggacagagaggcgggagtcagagtgaccagagcccgggtcagaggctggggccagagccagcccctcctaactctgcttctcagtgtccacgttggggtggccatgccagnncggctacaggaacctgacggagaccctgtggtcccaagtcagccacacagagactgctcactgtggctttgctgtgggcaaggccttggtggccgaggaacagagactgcctgggcagtgtagtgggctgccctgcatggtaggacaccctgcctagtggcctgccccgcctggtggggctccctgtggctccctgctggcttctggctctgaccatgccctgggcctagcagtgttgtcttctggccattcccctctgataccaaccagcagcccccagaggactcattaggctgctggtgtctccagctgagccctctgaggtgtggcaggcaggcctgacatcacagcctgggtgagtcactgtgggctgggtgagtcactgcgggctgagtgaggggtcccagctgaggaaagggcaggccacaggagcgncccccatcacagctccggctcccagccccgcagctgctccccatctctctgccaactgccagaacgacacaggaagctggggccggtgcctcaggtgccacgacagggtcctggaaaccattcccacccctctgagaggctgcagctgtgcctcccagtctcaggggatgcctagctacagaccggggtcttgggcaggatacctccggccaacggcccagctggactggagggcagaggtgcagcggagtaaagctcaggggacccacacatgcccctaaaggtctccctcacatgccaccagcccaggggcctggggaagagtgggctccttgattcctcccggctcctgtacccttttcgggcaccctgggctggctgcagtgtggagcccctcgagggagagggccagggcgggggctgtggttggctctgctgcatctgacagcttgcccatcctcaagtgccaggtggaggtcagaaaatctcccctggctttcacgtgcatcccttgccccaacccgccccagcaagtgggcacgaggtaagggctcctttgccagcccctcctccctccctgtgtctcttcctgtttgtgggctcacctgaagtgtgaagagggggagtgccactctccatccaggccccaggcaagcagcacctccctgctctcctgcactcctggacacaaccagcagctcctgccatggacaggtggtacctgggtgagtcctctgagccccattcctcctccctgctcaggctctaacacaggtgccagccccgtccctttcaagtgcacccacaagctccccagaagtgcaggaaaagcagaaaggaagagaggcagaatttccaaaaaagagcatctccatacggagtcactggcctgctgtaacgtgtgtgcagagcatatctgagctgcgagggctgggaaggcagctgtccaactgcctcatttacttgtctgtccatccgtcccttagagatgcaggaactcagaagccaggctgctggcttgaaatcttggttcccctaccctctggccatctgacctctggcaagttatttaacttatctgggcctcagtttcttcctctatgaaatggggtgataataatgccttctttaccttctaaaactcattgtgatgactaaagaattaatttctggccaggcatggtggctcacgcctgtaattccagcactttgggaggccaaggcgggcggattatctgaggtcaggagttcgagaccagcctgaccaacatggtgaaaccccgtctctactaaaaatacaaaactagccgggcttggtggcacatgcctttaatcccagctactcaggaggctgagacaggagagtcacttgaacccgggaggcggaggttgcagtgagtcgagatcgcaccattgcactccagcctgggtgacaagagcgaaactccgtctcaaaaaaaagaattaatttctgtaaagtgcttgaaacggtgccntgcacacagagtttaaaaatgtagccatcaactagctttccctattgcttcctattcatctatctattgatcgatctatcatccatatctatctatctatctatctatctatctatctatctatctatctctctatttatctatctatccatccatctgttggtgcctccccatgcacctcctcccccccgcagtgggagcccttccatccacactgcagctttgtttgtgaccagggtaaatattacctggcactgttaatgtttaatgcccccacctcatccccagccaccccaccaaggagcaaagacagcaggaagaggcaagtggagacagtccatttgggtggggaaatgactgggttgtcaatggatagatagatagatagacagatagatagatagatagatagatagatagatagatagatagatagacagacagacagacagacagacagatgaatttatttaacttcccacttatttttacatctcttattattcccgaaagactccatggaggcttacaaatacagaccaaatgcaataagataacacaatcctgtataataaagggagcacccttgtcttgtgtggagatggcagtagctttggtagcacatcttggaggatctgggctttctacctccagtttgccattaactgtgtgtttcaggcaagtcccttcaccttcctgccctcgttttttctggtgtacccagtgccctggccacgtccaggggctattgtggaaagcaaatgagcagcctcaagtttctttatctgtaaaacgccattagtaggaattaagtgatgcagtgcattccaagagcctggcacgtggtccatcttcaccaaacgctggctctgctgtgatgtttgcacgaatatatatttcttggctccagaagcagaagggagctgaacgggtattgcagcgcctgatctgcagggccatgccattctctccgtctcactcattcgtgcccattttcattggagggtggctggcttttccatgtccaacagcaaacatttgccaaaggctaatgcttgtcatttcttcaatcaacacacatataacagtaaaaatgatgccactcaccgtgtgccaggccctgggatatgctctttgcatgcattatctcacttcccctcaccaccaccctaggagctgggtactgcgcccattttacagatgaggagactgaggcacagagaggtgaagtcattgactgagaccacaccattagcaagtgagagggccagggtgtgaactcaagtgccaagccctgcccctgcttggggaggattcatggatacagtggctcccttcagaagggctcaagctcccctgctgtccgctggccactgaccttggctgttttgtggccattgggcttcagccttttctggaggccaattcaatggactagaactcaacgaggattctacagtacctgtgactacccggcacaggagtcctggggcgaaggaggtcacagcggagtggggaggctgcctgcgaggtgtggaaagcatctgcctcctgcagcaggaggcctgattgtcagtctccacttcccccacactggctgtgtgaccctgggcaaggcccctacctctctgtgccttagacacctgcctcatcagtaaaatgggaaacataaagcttgaggagaaaaaacagtgaggaaagtgcttggtaaaccataaacgcagggggttttccccacgatgaaagtcttgccctgtccttaaggatcctgcatgctccatggtaaactggcaaggacacaatccgagagccaggccaaatggtggtaggaggaagtgccagggcggcagggaaggagaaattagttggggatgactgaagcccttctgaatgaggtgtaacctgcagggtgcacgttgatgggtgaataggatgacagatgaagggcccttctggaggatctactgctggtcagctttggcggtgctccagggatgtggtgggggagcagtgggccaggctcctagggaccactgcaggaaagcctccagtaccacataaggaacaccagctgcagcggcggcatccatggtggctggtgcggtgggccctgcctgggctgggggccactgtgggccactgcccccagaaactcccaagtacagtgtacactgaagagattgtgcaacttccactttcctgttcccaccgccccagctgtagcttccccagctggcagaacagcacgactgctgacccatcccaacccttctctttggaaatttcctttgggaaggtttggaaactcagccagctcctccctgcccctgcctccccacgcacgtcctcaccctgcagagggagcccctccatccacactgcagcttttcttgtgaccagggtaaatattacctggcactgttaatgtttaatgcccgcacctcgtccccggccaccccgtggaggcagccagacactctccaaaaagcagagacagcaggaagaggggagtggaggcagcccattcacctggggaaatgactgggttgtcgatggacggtggtgagtgtgctggtgtgcgtgcccgggcgtgtgcaatgctgggtggctctgattggcctgcctttgtggggtcagctggaccctactcttccctctcctgccacctcagccttccagagtacccagcccctcttcctgtcggcctcctctctaagaaaatttgcaacttaaaggaggaccctgctttaaccccaaaagaaagatagctttgagtggcagaaaggcagcagatagaagctggagagctgagcgttcctcctcggcctcctggcacacacccgccctgagttcaatgcatcttgctagaccgtctgaacttgggcgggaggcagacggcgtccatctggctggggaaggagcaagcccctctggtcagccttcctaggctggatttggggtgagagcccgccaagttcaagtcacactctccaaaggcttcctgtcacaggaactgactcaggcctggaaaccaagaggggcacttgctgacagaggtgggttttgagccagatgcagaaaggggagggtgctgggcagggagggtctcagcaagcggctcagggccaggtggccacggaggaggaggtttcctggggcgtgtggggaagcctcagctggcgtctagctgttgctctgacacttaaatccccatatgaccttaaacaaggcctgaaccaaatctgggaagacagccctgacggccttctgtgtgggacctgggtccttcatggcctccctgagcacccagcacctcaggcccgtcaggatgggcactgactcttcctggcctgtcctttcctggcccagggactggccgctggggacagctgggcttgacagaccctaagtctcactgctgctcaggggcacagtttggcacagcccggaaagtgctaacttgcgcgttccttcctcctcgggctccacttccctcgtgcgagaaggggctccggcagggcaggaaagagtagcggcccttagctgtggcagaagcgtcctggccaggccaccgtctggctgtccggggcaagtgtactcagttgcagggcaccactgtgagacctgcctgctgagcggctccaaatccgggggaggccaccagaggcaggggcaggaccttgcctctaacgggctccttccctcccgccattgagaggtggcagatcaaagggcttatgcacctccattctcagccccctgcttcctgggttcaaacaccagctctacccctgacttgctgtataactgtgggggaatttcttctctgcacttccaccctcttgtggattacaccagaatgacattgacgcctcataaggttgccataatggtagatgagttagggtttgttagtttttgcccggtgcctgaccagcactatatattaatgtttcttaactagatctgcttcccctgaggatggtaacgcaggaaaggaggtctgtctcagctttcattaggactttgaacaagtctacacattgggctcggcttcctccttctgtttgataaactttaaggttctgttttatttattcatgcatttcccaaatagctgctaagcacctgatagccaaatggtcctgtggagagaggccgctgggagtctaatgggagaggcttctcctggccttttctaccatggtaggaatcaaggagcaggagagagccacccttccggagtggtcagaggccccccagacagcacggatccccctcggacactcggtatttggtccccagttgagcgtgtctgaagccgcctggagcagaagcctgcttggcaatggttttagcaacacccctgctcccagcctccccttcgcctgcttggaccctcgagggtcctctgggaagggaaggacagggaattccagctgttcctgtggctggcttcaccatcggtgactcctctcatcccacctctggctctctcctaggcggcagccccaagggggacgtggacccgttctactatggtaagcctgggcccctgcgcacccttcctgagccctcaggaccccttccaccaagcagcggcctctcccagccccaggtccatgctctgtgccccttatctcccctgggttaccacgggcttgctgcgggcaggctgcggagagagacagctgctgggagagaccacccatcccgctcctcttgccctctctttccggagactatgagaccgttcgcaatgggggcctgatcttcgctggactggccttcatcgtggggctcctcatcctcctcagtaagtggggtggcctccagggaaggggtgctgaccagggcacctctcttctcaaggccgctgagcaggctggctttcgggagttgccaagggaggggtgagcctccccaccacgccccccactgcaggatgtgggaatgggtgcccggtggggtgccaggctcgctgggagcacagtgtgaggttcctgcttgctcaagtgcaccctccagtgggcccgggaggagccgcagaagtgagagcaaacccacggggtaactgggtaaccggagggccaggacagggggactaggccccccgctgctaaccatggtcccaaactcatttgttaaatagggatgatcccacctgcctcacaagattagggctagcatccaaagacatggcagtcaggacagcgctctgagaacggtccagtgcagactcggagtgttctgggggagacaaagagagttatgtatcctcaagccccgaggggcacacagcaggagcttaataactgcacattgacttgttttggtccaacccaaagaaaaatacacagaaaacacaacccatggaaagaagatacagcaagcacacctgtgggctctggacttctaatgcacgtgtgccactgccaccccaccccaaggctcgggccacagtcctgcgggtctccccattttcccgtgttgcccatggcagctctctctacgtgtgccactgccagcccaccccaaggctcgggccacagtcctgcaggtctccccattttcacatgttgcccgtggcagcttcccggagggcagtgccgggtggcagctgatcacataggcacaggaggcaggtggcctaagcaaggggctccactttgaagttgctgccatccttctccaggtgttcatcggccagttgtgctgggggcaccatgatggcccagcctttgctgttactctcgatatgccaacagacaaccgtggatctgctccagtaaatatttgctgactgactgactgacttaggttcttaaatgcctatggtccagccttatttaaagagagagaaggctgggcgtggtggctcatgcctgtaatgccggcatattaggaggccaaggcaggaggatctcttgagaccaggaggttaagaccagcctggtcaatacaggtagacccgatctaatccaaaaaaaattttttttaattagctgggcatggtgacatgtacctatagtcccagctacttgggaggctgaggcaggaggattacttgagcccaggagtttgaggctgcagtgagctacgatcccaccactgcactccagctgggtgacagagtaagaccccgtctcaaaaaataaaataaaataaaatataaaataaaatagagacagtcaaacgtggcctccaagcctgaccctgcgatgatactggcaggagggaggtaggagagactggaagaattttgagtcttccagggtctccttggaaaattagtccatggaaacaaatctccttttctcttttcaaggcagaagattccgctgtgggggcaataagaagcgcaggtgagcgctgcctggggtgaccgatgagggggttggggctggagaaggaggggcgggctgaggatttttgtcctctgacacagtggaggatccccagcctcagagatccctagacccacccctccccctgccctctcacctgttgcttttccttcccccaccaggcaaatcaatgaagatgagccgtaacagcaggtatgctaggagggcctggggaaggtgcggggagggcagggcaggcttgggagcaacagggaagaattctggctcctggactcggtaaataagaattttagggtcgtccacacatcagccaggtggtctgtcacccatcgtgtgtttaaaatgatggccaagggcctggcgtggagtgtgtgccgcaggagatcacagaggagccctggagaaaagtgagatggacaaggggaaaataaaaccccaacctctgctgcctcccacccaaccccatcctgcctttgtcttctcagcctcggcggtgccacccactgcactggggccagctgggaagccaagcatggccctgcctctggcgcctccccttcttccctgggctttagacctttgtccccgtcactgccagcgcttgggctgaaggaagctccagactcaatgtgacccccaggtggcatcgccaactcctgcctcgtgccacctcatgcttataataaagccggcgtcagagaccgctgcttccctcacctgcctgcctgtctccctcctctgtcaccaccagcctctccaagctcaagtacaaatacagccggg

SEQ ID NO: 942 - DNA, 2473 bp, Homo sapiens
atgtcgaaacggctccggagcagcgaggtgtgcgctgactgcagcgggccggatccttcctgggcatcagtaaataggggaacgtttttatgtgatgagtgctgcagtgtccatcggagtctagggcgccatatctcccaagtgaggcatctgaaacacacaccgtggcctccaacactgcttcagatggttgagaccttgtataataacggtgctaactctatatgggagcattctttgctggaccctgcgtctattatgagtggaagacgtaaagctaatccacaggataaagtacatcccaataaagcggaattcatcagagccaagtatcagatgttagcgttcgtccatcgcttgccctgccgggatgacgatagtgtgactgccaaagatcttagcaagcaactccattcgagcgtgagaacagggaatcttgaaacctgtttgagactgttatctttaggagcacaagccaacttctttcatcctgaaaaaggaaacaccccactccatgttgcctccaaagcagggcagattttacaggctgaattattggcagtatatggagcagacccaggcacacaggattctagtgggaaaactcccgttgattatgcaaggcaaggagggcaccatgagctggcagagcgcctcgtggaaatacagtatgagctaacggacagactagccttctatctctgtggcaggaaaccagatcacaaaaatggacagcactttataatacctcaaatggcagacagcagcctggatttgtctgaattggcaaaagctgctaagaagaaacttcaatctctaagtaatcatttgtttgaagaacttgccatggatgtgtacgatgaagttgacaggcgagagacggatgcagtctggcttgccacgcaaaaccacagcgccctggtaaccgagacaacggtcgtcccctttcttccggtcaatcctgagtactcatcaacacgaaatcagggcagacagaagttagctcggttcaacgcccatgagtttgccacgctggtcattgacattctcagtgacgccaagaggagacagcagggcagttctctctcgggttcaaaagacaatgtggagctcatactgaaaaccatcaataaccagcacagcgttgagagtcaagacaacgatcagcccgactatgacagcgtggcatcagacgaagacacagatttggaaaccactgcaagcaaaacaaaccggcagaagagcctagattcagatttatcagatggaccagtcactgtacaggaatttatggaggtcaaaaacgctctagtggcttctgaggccaagatacagcagctaatgaaggtgaataacaacttgagtgacgagctgagaattatgcagaaaaagcttcaaacactccagagtgaaaattcgaacctcaggaaacaggccacaaccaatgtatatcaggtgcaaactggttctgagtacacagacacttccaaccactcttccttaaagagacgtccgtctgcccggggcagtaggcccatgtccatgtacgagaccggatcaggtcagaaaccatatctcccaatgggagaagcgagccgccccgaagagagcaggatgagactccagcccttccccgcgcacatcgggaggagtgcacttgtgacctcctcttcatctctgccttccttcccctccacactttcctggtcgagggacgaaagcgcccgaagggcatccaggctggagaagcagaacagcacacctgagagtgactacgacaacactcccaacgacatggagccagatggcatggggtcaagccgaaagggacggcaaagaagtatggtgtggccaggggatggcttggtaccagacacagcagaaccccatgtggccccaagccccactctccctagcaccgaagatgtcatcaggaagactgaacagatcaccaaaaacatacaggagctcttaagagcagcccaagaaaataaacatgacagttatattccctgctcagagaggatacacgtagctgttacagaaatggcagcattattccccaaaaaacccaagtctgatatggtgaggacttcccttcgtttactgacgtccagtgcctaccgactgcagtcagagtgcaagaagaccctcccaggggaccccggctcacccacagacgttcagctggtcacgcagcaggtcatccagtgtgcgtacgacatcgccaaggctgccaagcagctggttaccatcaccaccaaagagaacaacaactgacaagggcagggcaccgcctcctctgttttctaggctttataaagtccaatttcaaattcagacgcagaactcttcagatttctacaaaaagaaacatttaatgacggtttaaaactttttaaaagaaaactcagtattatttttgcatgttttctaaccaattttcaactatttaacccacttgccttatttt

SEQ ID NO: 943 - DNA, 59102 bp, Homo sapiens
agttgggggctacatgctctatgtagccacaaccttcaagtatgtgtttgacttccatgcagaggatgtgttctggtgcacggcagacattggttggatcactggtcattcctacgtcacctatgggccactggccaatggtgccaccagtgttttggtgagaagggagccacctggcctagctgggggatggacaagattatcctgggtgactacctcccaaggctgcttggtctagagggagggggacttatacaatcatctgttttctggagaaagagaagtcctgagggggttgcgtatcctgactaggatggtatcttggcttgtctggccagggagtgaagatatggttggtcagaaagggcaaaatactgaacctgagggaatggtagggggatgaatagaaggactattaggaaagactgggaatgaccagccttcatgggtcagtttgaggggattcccacatatccggacgtgaaccgcctgtggagcattgtggacaaatacaaggtgaccaagttctacacagcacccacagccatccgtctgctcatgaagtttggagatgagcctgtcaccaagtgagacctcttcccagttgctgccctgtgggtatccctcagagctgggtgctggcctttgtacagtctcttcttttccattgtcccaactctctgacctggaatagaggatggggcaagagaaaagcctgggtatgtgtgtcttccagtagtactcagagccttcctctctcccattcccctgccccaggcatagccgggcatccttgcaggtgttaggcacagtgggtgaacccatcaaccctgaggcctggctatggtaccaccgggtggtaggtgcccagcgctgccccatcgtggacaccttctggcaaacagagacagtgagtgaagggtacagaaggctggggcccagggacaatgtgggaagattgactcaaatttctcatctctgacttccccagggtggccacatgttgactccccttcctggtgccacacccatgaaacccggttctgctgtgagtgatgcttccctggctggtcttgggctaggcagggatggtgtcttggggcacttggcctagttagatagtggagaactggactgacatgtgtgaagaatttggggttctggggccccttgggagttgagtcagagttgcctcattcctcttcttgggttctgtctcccgtttgcttctagactttcccattctttggtgtagctcctgcaatcctgaatgagtccggggaagagttggaaggtgaagctgaaggttatctggtgaggccctggcccttgggagtctttaaggagagagggaaagggtctgccaagggtactttgctttagagttaataacctaatctctcctggtagctgcttaggactgaaacttcatggttggaggtttgctcactgagagaccctggaggggaccctcgatactttgcctgcatctcttccttttgggccataagtctcctaagggcgttttaagagttgctcagattcctgatggtacctttttgggtctggaagactaagtcccatcttcttttgacaaagattctacagaaaggaggctttataacatagtagaaaatcacgtaggatctggagtcaccctgcctgggttcgaatcctagctctgcctcttctgtgacctcagataagttatttaacacctctgaatctacattttctaatttgtaaaatagggttaaagtggtgtctctggccgggcacggtggctcacacctgtaatcctagcactttgggaggctgaggtgggcggatcacctgaggccaggagtgcaagaccagcctggccaacatggtgaaaccccgtctttaccaaaaatacaaaaagtaactgggcgtggtggtggacgtctgtaatcccagctacacgggaggctgagacaggagaatcacttgaaccggggaggtggaggttgtattgagccgaaattgtgccattgcacttcatcctgggcaacaagagcaaaattccgtctcagaaaaaaataatgcctttgtctcctatggttgcttgcttgattgagttagataatccacatgaaggggttagcagagaaactaacaattagtacttgataaacattagctgttgtgattattgtattcatacttgcaggagcctcacctgtcccttcaaccccaccccatttcactttcccaagagcaagttagtaacagggacagggcttacatccaggccttctgactcagcctagaattccatccattccatcgatctgctgccaaagaatgttactgattgggcaataattatttacttggtgtgtgggcaccactgttttttaaatgagtgttttcatttgtatcaaactggacctgctttcctcaaggattgcccaaaaggagacacaaatttactaaacacttatcaataatagaacaccgtgctaggcaatttccatatactattaatttaatcctcacaataactttggaagacagaaagtattttctctgatttacagatgaggatcctgaagctcagaggggtaaagttacttctctgaggtcacctagctagtaagtggtagagctgggattccaagccaggatcctctgtctccaaagcctgtacttcattcaggacactttcccccacatttagaaaagctgtaattatcttccagtgagacagcatagcaaatgtgatcactgtcccttcctcactccccaggtgttcaagcagccctggccagggatcatgcgcacagtctatgggaaccacgaacgctttgagacaacctactttaagaagtttcctggatactatgttacaggagatggtgagccttagctatccccctcttgcacctcccactaagacatgtaccttccacttccattttcaggaagagttggtgtgttgctataaaataatacctgagactgggtgatttataaagaaaagaggtttattttggatcatcattcttcaggctgtgcaggaagcatggtgctggcatctgcctatggtgaggcctcaggtagcttccaatcacggcagaaagcaaagggaaagccagtgtttgacatggcaagagaggaagcaagggagagagggaggagataccagcctcttttaaacaaccagatcttacatgaactcatagagttactgcaagtacagcaccaagccattcatgagggatctgtcccccccgccccccccacctccccggccttgaccaaaacacctcccaccaggccccacctctaacactggggatcatatttcaacatgagatttggaagggacaaacatccaaactatatcagttggttaggggtaaagaaaattagagaagaatgtgtcctacatgtcagtatctggtttctacgcagagctacaaagactgtaagggcaggaatgagtatagcaggaggggtctcagaatggtgccatccgaactttgatgtatgaggaaagatggacaatgtatgctcctgtgttgaaagagatggggcatgtggcagtgcatgactattatgtcatgtttgtctttatgtctggagtctgtgtttctccatctatccatctaccaatccattcatccataagatctgagcactgtgatcctgtgcccaggcactgatcatgaataatgtagtcaaaatctcctccctcatggggattctagtaaggggagacagacaaacccaacaaacataaataagcttatcttagatagagataaatgctgttaagaaaaataaacagggtagcatgatagtgtgtgcagggatggctactgtacacaggatcgtcggagaagacttctctgaattgacatttgagcagaggcctgaagggtgagaaggaaacaggcatgggaaaatctagagtaagagtgttttgtgcagagggacacagcttgagatgtctgaagaatggactgaagcctgtgtggctggagcgtagcaagcaaagggaagaatattacatgacgttggagacgtacataatacagggagggtcttgtgggccatggtgaggagtttgaattttattcaaagtacagtgggaaaccttttttttgttgttgttgttgttgttgtttgttttttttttgagacagaatctcactctgtcacccaggctggagtgcggtggcacgacctcagctcactgcaacctccacctcccgggttcaagcaattctcctgcctcagcttctcaagtagctgggattacaggcgggtgccaccatgcctggctaatttttgtatttttagtagagacggggtttcaccatgttggccatgttggtctcgaactcctgatccacccaccttggcctcccaaagtgctgggattacaggcatgagccaccatgcctggccaccttttggggttttaagcaggggagtgctaagaattgatttactgtttagaaaataactttgctggatttatggagaatagagtttaggtgagtatactattggcatggaacaaattatcccaaaagttggcagcttaaaataacaaatattatctcacacagtttctgaggatcaggagtctgtgaacagtttcactgggtagttctcattctgggtctcttgtgagtttcagtcaagctgttggtagggcctgtagtcatctgaaggtttgagtgagcctggaggacctacgttcatgcttactcgcatggttgttagcaggaatcctcagttcctcacctcaccataggactactcaatacatggcagctagcttaccctacagcaaatgatctgagacaatgcaaccgagacaagctaggtgtcttctacaacctaatctcagaagtgacatcctatcacttctgccaaatcctatgatgacacagactaaccctagtacaatgagaaagaggactgcagggctatgaataccaagaggcagagatcagtggtgccctcttggaggctggctactacagtgggcaagagtggaagcaggaagacttgttagaaggctattgcagaaggtgtagcagtttggtaatgtggatcaggtatcctaccgtagggtttttatttattaggttttgcatttcttcccaggctgccagcgggaccaggatggctattactggatcactggcaggattgatgacatgctcaatgtatctggtgagggccaggggccaccttcccatcttattaactctgctcctctgacaacacccagccgaagccttccgcaagagcccaggagtgtcctttggccagaccatgtactaagtgtagcattcagttctgggcccaggttttagaggagtaatgaacactggaatgtgcctagagtaggggaacttggatggtggggtgactgaaagcatgtcatctgaggagtgaatgaagggtcttctccatttggccagaccaggactgccccatgggtacagatggagcatgggctggggcagagcctgggatctctctcatggcacttcctttcccttgacaaggacacctgctgagtacagcagaggtggagtcagcacttgtggaacatgaggctgttgcagaggcagctgtggtgggccaccctcatcctgtgaagggtgaatgcctctactgctttgtcaccttgtgtgatggccacaccttcagccccaagctcaccgaggagctcaagaagcagagtaaggagcctccctgggcagggactatagggtctgtcttggaggcccagttatcactgcaagttgttggggaggggctagagcaagctgctccccaaaccacaaacagattccagggggccccatgggctgattgccctcttcctgttcagtctccactagtctcccactaggataataataatagccaacatttctagaatactttgtgccaccgctaggctaagtgctttaaatgaattaccccacttaatccctagagtcacctccatgaaacagatcttattgttaccttcatgctaaagatgatgaaactgagactcatggaagttaaatcacttgcccaaggccacactgctagaaaggtggcatttaaactctagcaggctcattctacagcctgagttccataagataaaatgagagagtaaagagacaagtgtgttgagagcaagagaagcagtgaacctgaggctgtctctgtgggcagggacttgaggaggaaacaggtggggaacaaagccatctctactttgatttttgaaaagtctggctaagggtgctgaagaaatgcttgatgatttgttggttacagttagagaaaagattggccccattgccacaccagactacatccagaatgcacctggcttgcctaaaacccgctcaggtatgttcagaggcctccatggattgggatgggctgaggcctggtggtggtggggtgtgcgtggatgaaagcctttggcagggctagggtgggtcagtgctttcaccaagtaactagaggtctgtggttccccagggaaaatcatgaggcgagtgcttcggaagattgctcagaatgaccatgacctcggggacatgtctactgtggctgacccatctgtcatcagtcacctcttcagccaccgctgcctgaccatccagtgaacatgatcctgacctttacctaggattcctcctgctccaaactttgcccatcctctttgccccctcaggagtgctgagggccagtgttgacccacactaccctcccttgaccagctgtctgggaccggaaaccagctttgtctccaggtagagacaacatcctgtgactgccaggcagaaaggacagggcccaggtcagcctcagtctgctgtgcctccagactgcagagctctcagaacccagaacagagacgaaaaggctacctctcctacccaagttaagtgttcaaaggggatgtgagggcctccactgaagcagggaggcagctgtgtaatcctatgtcagctctcttaggaagccccagtacttatattgggcatgcacttgcccttaaaaacaatgatttgtgagtccaggaacaatttactatttttaaaatattttgctgcttctgttctgggtctgaattcccttttgtgccagatgccagtactgtctgcccattggctccaggggctgtatgggcagattcagtctccagagggtattcagatcatctgcttctttgaaggagtaaatgtgttttgttcctagggccagaggagcttgtcttccttgtcctctgttcccaccctcccctgaacagaacccagcccataagagacattctcagatgaaactctgttttcttgccccagtcaggctcaagccctgtggttgtaggaataaagcctgtgatctcaagaagtggtgacttgttttcttaggtatctgtgccctgaggctgtatattcattagtggctctgatttgtgtggcagatgggaagggaggggtatttcctaggactatccccaatatcttccttctagaacttttggtttgggcagagcgaaggaggcttcactgacagggcctttgacaagcccctgagctaagcaggaaagtgactgaagccagttcacaactgttatgtatgtcccatcttggttgccttccctcctgggctcctgccagggactctcattcctccctgtgatccagtaagagcattagtgggtggctaaggattgaaacttcagggttccacctgtagagactggtctagggggaccctgattacagaccagtcacttccctgctctaatacatcttaagtgggctaacgtagattacagctcccgcctcccctctatgcacgaagtaaggaatcatcactgaatcagcaatgcagttttatttaaggcagaattagggaaaggctatgcccctccactccccctcctcctaccactcagtcctatcccaagtcaggcactggaacctgctgaaaaggctgatgaggggctgacaggagtggggcagggttcatggacctttacctcagagcagcttaccctgagctatacccacatctcaaggatttgggggcgtctagatctcatctaagggagacacaacttttctggtcctcagatggaaagctgggggaaggtaccagtatttacccttccataaaaactttggaggtctttaggaggatacccctcaggagggctaggagaggaatgacaaatacagaggatagaaggtcccgtggcctggttgtgccctcacacagggtatgggttgtccaggactgccactcccgctgccacaccaccatctgcatgctcgatggctttggttcgaagtagatgccccacgtgcttgttcatcacgagtgtcttttcctgcctatagaaatggaggcaggggacacacatcacctggactcagccccaaacccaggaccttccctggacccagctgagcagtacctgggtaactgtctataccaagaaagtgctaggattttagagtctctatgcctctctggagtctccttctagtcctaggttgtcaaaccatgtgttctgagtcctcttggtgctatttggagtttccttcacggttgcaaaggacttctcatcagggcttcatctgataccctggtaaggtgggcaggtcttgggtccttggcctcatttaatagataaagaaacaggtaataaagctagtgattggcagagctggcaccgaagcccaggattcctgactctttccagtgttcccctctaggctggctcacttggctggcactcttgcaagcaggtagtggaaagagcttctcctgattggctcacctgacatagaccccaaagatgcccagctctgaaatgcactggaccactcgggcagggctgccaggccgtagcaggcaattctcaaaaggctcaggttcgatcttctccatgaggatgtaggaggccctctcctcactgtccttcagctgtttcagggcctgtaccatttcctccccatataggttgttacctgcaatgaaactggccagtcaccctggaccctctgcctacctcctccatcccatgccctcacttttggggccacatgggcaagtcagcagcctcagttcctggcacccgctcagtgaagccagggcatatctggcttctcaggagggaagctcactttgacaggagagcccttactcatgcagtgaacacatcttccactacactgttctgccctggttctcctcctacctacagctgttccttctcaagctccattgctggctccttctcttaaatgctggggtcccaggggaattggtcctccacgcttgctctctcccccatgtacattttcccaaggagatctctcctattcctgagtctccatctataccctaaaaattgttaacttccggccgggcatggtggctcacgcctgtaatcccagcactttgggaggccgaggcaggcagatcatgaggtcaagagattgagaccatcctggccaatatgatgaaaccccatctctactaaaaatacaaaaattagctgggtgtggtggcgcacacctgtagtcccagctactcaggaggctgaggcaggagaatcgcttgaacctgggaggcagtggttgcagtgagccaagatcatgccactgcactccagcctggtgacagagcgagaatccgtctcaaaaaaaaaaaaaaaattgttaacttccaaatatttaatgcaggctccctgcttagacatcatatgactggcccccaaacaaactcaacttgtccaagcagaacttattacttctgcctgaacctgcccctcctggaccttcctactcccaatcaggcaaaaggtacccctgagtcatatttaactcctcccttccactaccctctcactatctaggacatgtctctccagttggccccatagtcatagccctagcccaggcctctacgttgctcttctgaacaactgtatcagcctcttccacggtctttctgcttccagtgtctcccctcattccaggacatcttctacaatgcagaaactgtaagttttgcaagttcccaccactgctaaccacttgagtcctggatcaatgtgtcccttcctggcttaaaactccctaatggcttcccactgcccttaagataaaatccaatttctcagtatatattcaaggccctttataatcaggatgcaaaccatttttccagcctaaatccctgtcccctcccagctccccctccagcctcaccagtttctcattaacctccaaacatctcacactttcatggcccggtgccttggcttgaggttgtcccttttgtatggaacactcttcctcctttccacctgggaaattcctacccacctcttaagacaaagattaaaaaaatcctctcctctggagaggcagacatgacccctgacctcaaggagtttcaaactagaaaggaaaacagacatgtattctctccagtctcctaatatgaccctactctacttcccaacaatctacccacaggcacctcaggtaaaacttgtccaaacccttcaatgctggttaatcagattcccctgtgctcccggacttggtcacagggtcttaggggacactgtccaacatgtggcctgtgtcagttccaatagtttcccccatgcccgggactgtgcccagagtaagtgccaatgagcactggccacagcctgctagtccctctcattgaggagccctgcaaagggagatccacctacctccaccctctctctggggctttagcacaaaccggctaggggcagcaagggcctcggcgatggcctggtccccttcttcaccctggcaggaggcagaaagcagttatcaaaagtttaaaggctaaagaggcaagaagcttaggtccagctggttatgcagagcagcatcagaggaagagcaggagggagaacagccacaaattccttcaggcaggatgctactatctggatgacactcccaacaaaccccctgcagcagccgatgcaatgagaacaggcctttctttagcaacagctcagggctctgcagcaggcagcctgatacacttctcaattcttgccacctgccttagtcccttccctctggttgccatcctcatctctacctttgctgagggagcttacaatggattccagcccccatccttccattatgaggctgcccttctgctcagagttctaggggttctccagagcatcaccaaccttgccagctccaccttccccttgtcacaatgccagctccaccctccccaacacattgggctgtaggtctctgccacctaggaggcctgtggtaggagaaacaggctgcccacgtaccacatccagtgagtagaggccagcaaaggtggcgcggaggcgggccacagcctcaggctggccagggagcaacatctccagcatgcccggcctgcttagctcctgctgcaccttcttagtcccagccagctgggtggcaatgtctgggcacttggcagcatgtgacctctccagcagtagacgtgcttcccaattctgcagagggaagaagacaaaaggaattcgactttattttacttcagctgacgtttactgaacatccatccattaggtgccaggtatcatgatttgtatcttcaccctcattatcacccaggatcattctaacatccttgtgagccaggtgtgatatgttgtagttatgtatcattgtgccagactgtgagcccctgcaaaggcaagaatcccccaatctgtgggaaacaatagaaggtgtaagggtagaacatttgtctacgtgctcagcttcccactgtgttccatactccctaccatggccttcaagatccttcaggagctggctcctgtctactttttcaaccttgtaccatccctgactcctagtctctgccattctactcacacaggcctgtcattcctcaaatcacaaagctctttccctcctcagggcctgcactgcttttccctcaacctgaaacccccttcctttcggcttttcccatgcatagctggatccttaccatccttacatctcagctcaatgtcaccttttcagagaaggcttccctgtccactctatttaatgtggatttcccataattctctttttacccagttgtttcattgaaagcagttacctgagactaaaacacacacatgcacacatacacgcacacgcacacaaacatacacacacaaatcccaatttttttttcctatttttgtttactttttttttcttttgagacgtgggtcttgctctgtcacccagactggagtgcaacagcgcaatcttggctcactgcaacttctacctcctgggctcaagtgatcctccctcctcagcctcccaagtagctgggactacaggtgcacgccaccacacccagctaatttttgtattatttgtagagatggggttttgccatgttgcccaggctggtcttgaactcctgagctcatgcaatccacctacctaggcctcccaaagtgctgggattacaggtacgagccacagtaaatggccatatttttgtttactttctgatgcccatttctctgaccagactgtgagctccatagcacagggctcttatcattttcctcattttctgttgtatctccagtgtctaacacagttcctggcactttgtagttgctcaataaatatttgttgttgttgctgaataagttgaaatttgagtggggttctgaaggacaggtagagcctgacaagtgagactcaatagggaagggatactcaggctaagagaataatatgaacacaggtctcaagtggatgatcacaggatgaatggtttattaccacaagagctgagggtataaaaggcaaggaaacagcaggggatcatgcctcccaactctggttcccattctcatgcaatggggagacagtctgtccttggctccagaccactgcaaactgcacacagcaggatcaggtctctcctgtgacccccacccaatgctgtccttcctttgatactactggtccacctgtagcaccttgacctgatcttcatcaataaccccaggaacccaactactagtctggcattccacgcagaatcacacgtgaccagaacatcagaaataaacccagagaaataccccattatggtagaagcaggaaagcaaaaccaaagataagcaaggacttgcccagggtcatctagtaagtcactaagccttctagatctctctccatgtctaaacctgctctgagctgctcagttccctaaaaatgtctacctcttggccaggtgtggtggctaacacctgtaatcccagcactttgggaggccaaggtgggtggatcgtaaggtcaggagttcgagaccagcctggccaacatggtgaaaccctgtctctattaaaaatacaaaaattagctgggtgtggtggtgggtgcctgtaatcccagctactcaggaggccgaggcaggagaatcgcttgaaactggaagtcaaaggttgcagtgagccgagatcgcaccactgtactccagcctggtcaacaagagcaaaactctgtctcaaaaaaaaaaaaaagtctacctctttaaacactactttccttccttgttatctcaaactcttctaagttttctttgtcgtgttttgaaatctagacccatttcttttttttttttttgagacagagtctcgctctgtcagccaggctggagtgcagtggcatgatctcaacttactgcaacctctgcctcccgggctcaagcaattctcctgcctcagcgtcctgagtagctgggattacaggggtatgccaccacgcccggctaatttttgtatttttagtagagacggggtttcaccatgttggccaggctggtcttgaactcctgacctcaggtaatccacctgccttggcctcccaaagtgctgggattataggcgtgaaccaccgtgcccggcctagacctatttttctaatagacagtttatctctcctgtagtcagcaagttgccaccactgctaaccacctatctaaagaaaaggatgttctatcgagataccacctctatagagcctcctcatgtggagctcaaccctcggggggagtcctagatgaattacagacctagaaggagccccctcagttttctagtgtagctccccccgctcatagaaacagacctagaaagggtcaggaacttgcccatcatcacacagaggcagtcaagctcatgacctccagctcactgcccatggtatttctaaacttatttcctcctttatcatctcccagctgagagcagagcttcttagcctctccatgatgtggatgttaggagcagaggagaagaatgggaataccatcggcctgaaagtcagaaaacctgggaacttcctgtagggccttagagaagcctctccatctctctaaacgttagtttctccatctgtataatggggataattatatgcctcaccgagtggttgtgagggttaaatgaaataatggatgtggaaactaatgaaactacatggtaggatagcaaaatgaggtgatataactgtcattaacatgaatgaggagatgataaaactttctgattcagataaaggaaaggtaagagttggcaggaaaaaaaatggtcagcagtatgctggaactggcttatatcaaccagtgagagctgattgttgttaaacatttgccagcacatctctggaaacagtgtaaatggctgaagctctgtggattcctgaggattcaaattctagaagactgtgtagagtgataggtagcaaaaggcttgagggaggataggaggttctagcagcaagctccctgagaaagaagtgaagtgaggactcggaaaacccaggttgttataagcctgaattgggtctctgtggagctcttgtgggtcccaggaggcaaagaatggtctcacagaaaataccaacctgtagactgtactgacgaggcatgtagccatcccggaagtaaaccacagcaatttcctggccatccctggaacacaggatggagaaggctgctgtgttaaattataactgatttgttcagtggttcaatctatttcagggtgcatcaagatgaatttggctttttcaaaattcagcccacagtgggagcctggtcaggggttcactggaaccagtgaaagtagatatccacactaccagggcttccactgaaaacagggaggtgtgccatacagaatactttagaatatgccagatttagagtcattctaagaaggccagaaggaacaagaaggtcactagaatcaaatttggtaaatgcatacaaatgttggctcgaaattaccgagcagcagaatcatactgccatgtgtagtaaaacacactttatatttccactgcttaaagcagctgaaaccagaatgaaaaaatttttaatggcaggggtgaaggtgaaaacgcaaacatgtaaaatgatgagtctgattaagacacaggctttttaaatgtcttttccttttctttgacctatttgatattgtctagtttatctgaaaagtaaattaactactttgtttagttatgataaaagcacattttgaaaaacagtgagtggtattgtgaaattccatggacagttttaattttaacaatcacaaaggtctaggtctaaatatatgtgctgcaatgctacccaaatatgtagcaccaaatctacctggtggtggcccctagagaaaaggataaggcttggcttggaacacaaatccaggctcgagctcagacagtggcatccagaccaatcacagcatgagccagctgctcctcttcctccctgactgcccagctcagcttctcaggcctgacctcaccttactaggagaggcaagaaaacttttgggaacttagggcatatgaaaactaagatgatctctaaggagaccctgatccagaatgtcaacagctctgatagaagcacagcgtggctggctttctccaaaatttcctgggaggatgagatatttcaggaattatgagagaaggaagcaagccatcacatctcccagaagaaagaatcattttggggaagagggtggcaggatgagtttcataaaccagccttccactggattcttgggaatgcttacacaaacagccttcggtcttggtccagagaccccttttcagagatatcttcaaatgttcgtcggatcacatggatgttcctgggaaaaatgggcaagagccagagggaatggatgctatgttctgagtgccccacccctaatcctggagccacacctagaagtcccccttcctttacttacctggccagtagctcattctctatggcacgctggtcaaatatgtttctttccttctcttgagcaatcagtagcaccagagcactggggaaagagcacaggtggcccgaggctactatagaacttgttcttcttttgtttctcccctcaacccccataccgccccacctcctggaataagaataagaacaccgcttccctgaaagaacagatgttccctctctcaggaaccttgagattacctcaggcatagacacctgatgctatcacatatgatttcctgaaaatagaaaacttcaaaaatgaagatgcctctgacccttctccagtgggcagatgaaatattgtaatgatgtcatgggttgatgaatttctgtgcaaattaaaatttagatttaaaaccatctcaaaaacccaagaggactttttcttagaacttaacataattctaaaatctttctggaagaataaacaagtgggagtattgaggaacattttgtaaaagaacaatgcagggggtccggggctaatggctctattactagattgtaaaggatacaataaaggaatgtggttcttacacaagatggaaccctacagaaacccacagggccaactacaaacaacgacattatctcctgggccctcccaagattcctataatgtacacagggccacatttgatctcatagtattaatgagatcactagggcttatgtggcttcttcctctctgattattcatgtatttcttaaagaggcaggggcttgagggctcagggaaaagcttatgccagggaactatctgtttggctgccagctaacatatttccgttgtcaaagataggtccagtcccctaagagattcctagggctaatgctcagcagtaccaaactgcattttttttcttttacattttattttatttatttttttgagacggagtctccccctgttgcccaggctggagtgcagtggcacaatctaggctcactgcaacctccaccccctgggttccagcgattctcctgcttcagcctcccgggtagctgggatttcaggtgtgcaccacccccgccggctaatttttgtagtttgagtagagatggggtttcaccatgttggccaggctgggctcgaactcctgacctcaggtgatctgcccgcctcggcctcccaaagtgttagcattacaggtgtgagccactgcgctcagcctccaaactccatttttgctgtgactgtactgctttgtgtctgtggcttcttcctgagacccatggaaccctaggctttggcttaggattctaagtgtgtattccctgacctcctctgcttagcctctcttgtctatctctgcttctcctgaccttggctgaacctcttagtctaaactctgtttgcctgactcctttctgcttagccaaaatataggtcttagtaagtcccctctcctggtttgcctgaaatctcatgaggtcagatgtgatgttaagctgagtcttggctttgagttgggtgcctgagagacaaactaaaagtggtgctctcacaagtcatcttgccctgagagagtcctaagggccaatggctttgctcttcactttgcagcctaaactgtcccgctcatgggtgagggtgtgtgtgggagggaggcagttggcccaggctggcccacctccaaaaagaggcggaggaggaaggctggcagctggaggttaaagaggaactgcacgccccagctaattaagtcagcctgccaactgctaaacaatcagagctgggctcagaaaacatatttgacctctcctgccttcagttctgagcagttctcagcagtctgtttcctagtaggaaagttgtcagctaaggacgcatgcgggctgggggtgaggacccctgagtcgtaggtagtccaggctctgccagtgacttgtagtgtgtcttggtaattgacttgggtaaggcaatttcgttccttgggccctggttttcccatctataaaataagagtgttatggctgggcatggtagctcacgcctatagtcccagcactttaagaggccgaggcgggcggattgcctgaggtcgggagtttgagaccagcctgaccaacatggagaaaccccgtttctactaaaaatacaaaattagccaggcgtggtggtgggcacctgtaatcccagttacttgggaggctaaggcaggaaaatcccttgaacctggaaggtggaggatgtagtgagccgagatcgtgccattgcactccagcctgggcaacaaaaacgaaactctgtctcaaaaaaaaagaaaaaaattggtgttaaaaagatcacagttcccaaacttttatcaccagtagtccccttttcttattctactcattctaaccacaggccctatgctttgagagtttgtctaaattgaaattgtaagtcattttgcaggcttccatttttaagaaattttaaaaatcatgagataattgacgaaaattaatctgctctaccaatgcagtttttcagtcaatactgtggaaccatatctcttaaaggcagaatagggaagtagagagaacataggctttagaggcagatgaattctatacttaccggttgtgtaactttgggcaagttattcaaactctcttagcctcagtttgctgttgtatgaattaaaactaatacttgtcaaatgatagctattattattattatttgggtttgttttttgttttttttttttttgagatggagtctcgctctgtcgcccaggctggagtgcagtggggtgatcttggccactgcaacttccacctcccgggttcaagtgattctcctgcctcagcatcccaagtagctgggactacaggtgcctgccaccatgcctggctaatttttgtattttttagtagagacaaggtttcaccatgttggccaggctggccttgaactcctgacctctgatgatccacccgcctcggtctcccaaagtgctgggattagaggtgtgagccactgcacccggcctattattattattgaaagtaccacataatgatccacacagatttttaaaaacatttttcagatccatgatctcatttaattctcactaacacccctttaggtattattattactcctattttacaaatgaggaaactgaagctcagagaagaactaacttgccaaggtcatgtgctatgtcagcagaagaacctatctcactctcacaatgggggaagccagttctggctcaggtgccacataactcctacctaccagtgcctaattttggacacacaagtattttctgtccacgttactgacaggctggcaggcaaaaccctctgcagcatttgtctgtcagcagttccccagctgacccatcccctggcttcactctcttaaaatacaacctagccaatatacttgaaagaatatttgtctgatgacttctaaatgcttacagtctgaggtttctttgggcttagtgaggcttagcaaggacagagaggctcccttggaggtaagagcatgattaagagtggaggttttagagggaggtagactttgggatctgccaccaactcatcacttagccttaacaattcacttcgtttctcagaacctcagtttcctcatctgtaaaatgagggagttgaacagtattgacctcagagagcttattatgagaattcaatgagatcctgtatgtacagagcttagcacaaggtgtagcactagtaagtgtacattaaggactattaatgctatattaacattgcaataactgttagtatagcggcccctcgatgatctgaaaatcacttacctaacatcttcacttgagaaataggaagaaagcaaaaaatgcctctaagcagttaaaaaggataccataaaatttcgtagtcaaagcttatgcatttactcatccaagaggccctcacactcttcagacccaatcataacaatctggatcatttgttttcccaaaccacagcaaatcagaagggaggcatgggcatggggggtggaggattccaaattcaagcataccaacagcagtcaaaagtaagagctgagaattgggaaacagacaagaaaactatgaagaaaatgaatgagaggccgggtgcagtggctcatgcctgtaatcccagcactttgggaggccaaggtgggcggatcacgaggtcaggagttcgagaccagcatgaccaacatggtgaaaccccgtctctactaaaaatacaaaaattagccaggtgtggcagcatgcgcctgaaatcccagctactcaggaggctgaggcagaagaattgcttgaacccgggaggtggaggttgaagtaagccaagattgtaccactgcactccagcctgggtgagagagtgagactctgtctcaaaaaaaaaaaaaaaaggaaatgactaagaacttaaagcctagcagtcagagctattagcgcaggcaaacagccttgcgtgcctctctaaccctaggtagcactactgtattacagcaagctgcaattgttgacagtcataatgatgacctccactcaataagaaaaagttaaatcatagtcagcatctgttatttaagaaggaaaccttaaaataattttggcatgtaaaggtataagtttctattcctagaaaaatccccttattctctaatgatggctggcaagaaaagaagttgctaaacccatgaatgctgaaactaaagcaggatcctcctgctaccttttcacacccttacttgggtgagccgtagagctcccaggctttggcaattcccagggccagtcccttgctgggattattagagaggatcttgccagcttctttggtcttactcaggacactgagaacatgtctgttggaagagagatggctgttcagtaattggatggacctggaagacccctctgcccatgacctcatatatacagcaacatgactctgagaatcagctgagcactaaaaagcatcctcccatcacattcctgtaagatccacttcaggttggaatatgctgggctgccctaaccttggcccctggtgtatatgcctggaggagacctgagagcctctgtccccaccccaacctaccctagtgtcccagtgagctggagccccttactctgggcctccaggtgctgtctggaatcctgctgcagaccatctaaaatcattgcaacctggagcatcactgctggctagaaatggatgctaccaggcccagcccccagacagaagtccctgcattcctctctctggggctctcaagatattgttccctctgcctgtacaatggagggacaggactagatgagctatgaggtcctttttctccctgacataccaaggatctcattacaagtggaaactgctgtcggggtggccaggggcaacatgtgacccggggcccaggaaagcacaatcatagctggagttccctggcctagccagtgactgtacacccatcagcatgtcaccccacaggtatgccgggggctgcccaggggacccaccggtgcacagctggggtccgggaggccaggcccccaaagctggcagagatggtgttgatttcgatctgtttcagggctggggagccatctgcgctgcgctggaacatgtagtctgagcgattcaggcccaggaacacagtctgtggggaaaactgaaggctgacagtacctgcccagggactgactctgaggacctagccacagagcacacaggtaccatgaactctacacagagattagaggtaccagcaaacactcccaagcccagtggaatcattcttctggtcatcctagaattggtcactgggataaacccagtgaggaccagtgagaggcagattcccatgagctgagggcctggaccaaattcttcaagcaaaacagaaaacaaacagagatgggagggacaggttacagactggagtagggctgggaatggttacctgggcaatgccctcttttaggacttgcttgtggatgtcaaagagacgagcggtaaagtcatcctgtttgatggtgctggaggaagaaacagagaacattttgcaggcttaattggacctaaaatttcaaggagtcccatcctcagtcattgactcctgaatcctctctgagtctactggccaaaacttgaatgtccgccccaatgtggtagagaacagtggctaagaatccaactctagacctgggttcaaatcctagctctaccactcactagtaggcaacctcagggaatcatttcacctctctgtgtctcagtttgctgatctttaaaatggagaatataattatatttatatcatagagttgtggtaaaaagccaataagatattacattcaaagaattgaacatactgcaccgaagaagagctagaaaatgacatgatgtatctattctacttgaatagctctgatggttggcaagccttctggttgacctaatactaactctccatagcttttcctaccctctgcgacctcccagggtgagccttctcctcctcctccacagcagcccttggagattagaagacagcagttatgccctgtgcaccaataagatttttctgacccaagctaaatatcctgggttttttttgtttgtttgtttcttcttcaactagtcctcatatgatgtgatttcctcagggaagccttccctatctgagtcagatccccctactatgtgttctcatagaactaagaaccactcctttacagcactgactgcagttgcaattttacattttctttgtgtgatgattagtgtcatctctcctgtttgactataaacctcatgaaggtaatggctgtgtctatgcaggctcatcgtcacagctcagtgtactgccatgacatgtgacatgtgttaggggcctatccagtatggttttctgaagtctcaacaagagccacagtaagaaggaatccacaggtgattaacatcacacttactgccctttgagattcagggtggattctgcacacctgctcaagcctgaatcaccttgttacagaaacgtcacagcagaccagtggggggaagccaagtagcccaggcctgccctgaagttcctctgctcctcagccagctctctcccaagggtgagctctctcatgccagcccttggttaggaggagagtcccagctgggcttcagcctccaaggaagttgagacacactttcctttttctgaagaggtgctccccttcatgttttgtagggggctcttctcccttaggaactagggtttatatgtgtatgagaggagagaggaacagagaaggcaggggttgcaaagatgagctgcaagtctccttcataattgcatcattagggttataagccaggctgctcatgtttcccacaatccaggattgcaggtacaaagctgggcccattccaagaaacagctcaggggcaaggtggtgggcagattcatacattcatgactcattgggtttttggctacaagtcaatggtttccaagcttcttaccattatgaccccttctcatattcacccacacatttttaaaagattttgtctccaacaaaagtctaatttctgttgaaaaattaatcaaagacatgcaattacaggttggatatcccttatccgaaatgcttgggaccagaagtctttcggattttggaagatttgcatatacgtaatgagacatcttggggatgggactcaagtctaaacacaaaattcatttgtttcatatacaccttatactcatagcctgaagattattttatacaatattttaattaattttgtgcatgaaacaaacttttgactgtgttttgactgcacctgtcacatgacatcaggcgtggcgttttccactggtagagtcatgtggtgttcaacaagttttgaattttggagcatttcagcttttggatttttggattagggatgctcaacctgtacagtatatacacatctagcatgtatatgtaaatacataatatttctagatatttaattctacaatgaatatatatacatatatatatgtattattatttctttttttttgagatggagtctcgctctgtcgcccaggctggagtacagtgtcgtgatcttggcttactgcagcctctgcctcctgggttcaagcgattctcctgcctcagcctcccaagtagctgggattataggcacccgccaccacacccagctaatttttttatatttttagtagagacggggtttcaccatgttggccaggctggtctcaaactcctgaccttaagtgatccacccacctcggcctcccaaagtgctgggattacaggcctgagccaccgcgcccagcctatatatatttaattctaaaataaataaagaaattttaagaaattgccccagaatctgaagaaaaaaaaaaaaagatcaagggaaagagacagagaagggcggatgggctgaaccatttcagaggttgcttcctcatgccctgagtgtggcccagtctgtaccccatcccatccaaagatgagaggcctgaggtgacaagaaagtgtcgctgcttaggagaagtagaaaatctgactttaacccaataaccttccctacctctgttttcctccaaaaccaggctgacttcccctaattccaaatggaaatatcagtcttcaaagtagggtgtcacggattacagaatgtcaacaataaagggatcttggatttaagccagtctcttcatttttcagatgaagaaaccttaggcccagagaaggaaagggagtggcttgaggccatataaataactggtcgagccaggattagaagccagctttcctgactcctatgactttttgttctttggaggtacctttcctctatcccaccaagtcagctgacacagtaacacctcacggctctgcaatcttccagttccttggctctggcagctcctggccccccaatgcttcactgtcccctacctggaaagagtttgctccaggaaggcagcgttctggctgacagcatccactagcaggttgaagtccatctgcacagcataggcttgctccagcagggcactggggaccagtgaggggaagagcgtgaatggggcatagctcaccacctgtgatcaagaagagagaatgggacaggggtagggcacctgtgaacgggttgtcttcctgcaaatggaatcccatggaaagtctggcctatatttactgaggacacaccaactgtagattagtggttaccttgggagagtggaagggggagagtggaacccagagagcttccagattctgtgatagtttatctctacgtattgaagagagagaagcaaaaaagcaaaatgcaaataacaaaaagaaacccacaagttattgagcacttactatgtgcaaggtactattttaaatactttacatagattcatcattcagccctgtgaggaagatactattattatccacacttaacagagacgggacctgagaaagagaggttaacagatccaaaattatattcagctaggaactggtgctgggatttgaaccagaacagttaacagatccaaaattatattcagctagtaacggggtgctgggatttgaaccaggatggttactaaacacaacacacacatacatacatggaagcctgctccttgctggttgatgttcaagcccaggcccttccatgcatcaggagctcacactccagtttccttgccttttgattttgatttggttactgggtaggacaagtgaactctggttcccttagtagaagccaggagtgttttttccaccaatgttagtgatggtgactcaggttaacaggcctagagttcagctgcattccgcattctttggactttatcatagacgagaaacccaaataccatcaaggacactgattctagaagggaaaagtgcattctgagatccctgccaacaactgaactagaacttgggtaagagatgaaaagaaaatcttgtgacttgtattataaagcattcctgagtttaacctttgagttaatatcagtttgtcattatggtggtataagtttacggtgttagaacttggtatttagatatttatttttaaagtactatttttttttttgaggtagagtctcactctgttgcccaggctggagtgcagtggtacaatctcggctcactgcaacctccatctcctgggttcaagcaattctcctgcctcagcctcccaagtagctgagactacaggtgtgtgccaccacacccaggtaatttttgtatttttagtagagatggggtttcactgtgttgtccaggctggtctcaaacacctggcctcaagtgatctgcctgcctcagcctcccaaagtgttgggattacaggcatgagccaccatgcccagccaaaatattattatttttttaacaggtaatacaaatacatgatacaaaattcaaaagagacataagaatatatagtgagaagtatgtctcactctcattccagtctcctggggaaaagactgggccccagccacccagttctcctccccagaggcaaatgacagactagtgtctcacacatccttccagtcatctttgtattgatatatatgtatacacatatattttctctttttttcacccccatagcaaactatactacattgtgctttttaaatatttccttatatgttcaaatagagcattttcattatttttaattgctgtatattattctactcttaggatataccataatttattgaatctagtatataggtggtttctttattttcctattaccattaatgtttcaatgggtatcctagaatatacattctagatattttcatatatgagaaagtccatacattctaaatttctaaaagtaaaaatatcaagtaattcaggtaaatctattttaaattttggtagataatttctaaattacccttctcagcatcttttttttttttttttggagtggggtcttactatgttgcccagactggaatacagtggctattcataggtgccatcatagtgcactatagcctcaaattcctgggctcaagcaatcctcctgtctcagcctccccagtagctgagactgcaggtgtgtaccactgccctggcctcagcatctaagataaaactgaggaaggctatttgtgagaataaggtttattcagtctgaagcctttatgagttagaatgggaatgactgcagattacataaggggtgacctaataccctgagtagctatgtgatgactacaggagcatttccttggcttgaacacatagagctctgctgcccccaacaagtctcatcttggcctcaaaaactcagagtttttctgctaagacatccctctgcctctgtcccagggctcattatgccctcctgaatttaggatcaatagtttatagctgttctctgctatctacaggctaaaggctgaaacacacagtcttctcacttttgatagagacattaacataaaatgacattactggccgggcacggtggctcatgcctgtaatcccagcactttgggaggccgaggcgggcagatcacaagatcaagagatcgagaccatcctggccaacatggtgaaaccccatctctactaaaaatacaaaaattagctgggcgtggtggcacacacccgtagtcccagctgctctggaggctgaggcaggagaatcgcttgaacccaggaggcagaggttgcagtgagctgagatcgtgccactgcactccagcctggcgacagagtgagactctgtctcaaaaaaaaaaaaagaaacatttttctactatttaaaaaaacctatagcacgtgcatgacaaaattctgctttgtagccaggaagcaacagggagtgataggaattgtggcaaaaagaagtacttgcatcttctctaaagggggcagccagaactctgctctagccaattgttgccatgcaggaaagtaggccagagttgccagatgatataatttttcaagacaagttgggttgctagattttttgttttaatttcatgatttttttttttaaatgttggctctgactttttaaaaatactctggtgaaaacaactgttaacaatgcttgcccctggtcagggaaacagtggctggaggaaggggacttactctgtactgaatacccttttgaattttgcgccctgttcaaatgtatttgaacgtattacttattgtaaaaaacaaattaactccccaaacactgcaggagccaaatactcagcctagatatggctagtttgcagctctgatctacaggataaagttcatactcctcctccacccagtagctaaggccccgcggctgtctgacgctggcctgccttctttcccactatatccacttatgcgccctgcatttcagctgcattctcttgaacatttttttttttttttgccttttcctacttttgggtccttgctatgctgttccttttccctatttgtcttttaaggtctagttcaaataccaccccccatctcaatcatctaatcataatgaactactctttcttccagctgtcctatatagtatcttgggagaggaaaaaaagcatggatgttcagagcatggactcaggagccaaattccttgggttcacatcctggctctgccaattattttaccatttaaataacctcaggtaggttacttagcctctctgggcttcggtttccttatctctgttgtggtgaggagtcagtgattccaaagtgtttagaataatgcctggcacatactaaatactcaataaatgatagttaactttgtgtagcagactgcctgtgtttcctcatagagctgatgttatttaattttgttttgtggtatgttctctaactagaccaggagccccagaggctagggctctggctgactcacctctctgtcctcagtgcctacaatggcccggcatagagcaggcatttggtaaagatttggagtaaaatcattctctctctctctctctcacacacacacacacacacacatacacacacacgtacactttctgactttttttctggattagaaatctcattgtggattacgccttttctaggctccataacctcccagaaagaccaagtgttggatcttcacatggtacctattgattaacagaagaaacaaaagcgtggaagagaaaatgcttcattttagattcatacaagtaattcacaaaatctaggttcacagcccaagcaattctattccataccatcagcctgccttaggtgacagacattgtcatttacttgggccttagcaaacaattactgagtgtggactccatcaggcctgtgtaggttctgggcacacagagacaaaaaagaatgggtctggctaaaaaaagaagagatgttggcagctctttagtcaccaatatggtcttaaggtgtactgttaagttaaagaaaaaaaagtgggcaaaaggaggctgggcacggtggttcacacctgtaatcccagcaattttggggggcagaggccagtggatcacttgaagtcaggagtttgagaccagcctggacaacatggtgaaaccctgtccctaccaaaaaaaaaaaaaaaattagccaggcgtagtggcacatgcctgtagtcccagctacttgggaggctgaggtgggagaattgcttgaacccaggaggcggaggttgcagtgagccaagattgtgccactacactccagcctgggcaacagagcgaggccccaaggaatatatttacttgttattagttacttgttatgaataagccatctgaaaggatcaacaagaaaccaaaacacaagctgcattagggtaaactcttgtaccatttgaatttgaaccatgaaaatgtcttacctagtcaccaaattaaaaaagattttatttttttatttttttttcttccctaaggatgaggttttaaaaaggtgtggtttggactcagcagttctacttttacgtattgaacctggagaaacactcacataggtgccccaacagacatatgcatggatgttccctataatgctatttatggtcataaaataatgagaaatcacctaaatagacatgagtagagggaagctaaactgtgatacacccacatctggaatactatgcctcagaatgaagatgaccctaatagaaggcattagaaagttctaagacagacaaataaaaaaccaaaaacatatcatagaataatatatatgatacaatttgttttttaaaaaagacgtatttctatatatacctatctatgtatataaatgcacagagaaaggcttgaaagcatatatcacaaaccagttacagagaaggtagagtgattatggggttttcagtaatagctcactgggcaaagtgcttcacatgaatcatcctgtaattctcttaccaaaccagtgaggtaggtcctattattatcccatttttacacctgaagaaactgcagctgagagcggttaagtaatttgcctaagtcacacttcaaaccccatatttaaatttgattactccaggacactgcctttttattttctacttctagagatcaattttagttactggaaaaaataaggcaaaagagatatggtccctgatgcaaaggagtgaccctcagcctggccggggccagacagtgggccatggtgaatgctgtggggaggagctaggggcttacctccgaggaagtgggctcctgtgaggtcctcagcaatactccctcagccagggcccggtccacggcctgccgtgccagctcctctagctgctgtttatcctgcaagaggctcccccagttggtggccatcccaacacctgcaaaagatggagagaagagagttggtaacagatggcctgaagcccagcaaccaccgaaactggctggcggccacccccaacacagcaggaccctgacctctgttggaagggaacagcgtggtatacaggagtgaacactggctggttctagctcttaacaacttccatgtgcacaaaatagaaagcttgacaaagcatttccattgccactctctcttttgattcccaacacaatggcattattctcacagtaaggaagcagaggcttggagaggtgaaatgacttgcccgaggtgatgactggtatagcctggacttgaacccatgtctctggactcccagcctaaaggctcttcattggagaaagaagcactaatatcagatgtgactggggcaagttccttcccttcccagagctacagattccctaactgtgaaacaagaagaatcggatagatcagtttccaaacctggctgaacattctggggagctgggaaagaatacagattcctgggccccatcccagagactctgatgcaagaggcctgatgggaaggaggggttgaggctttgtatttttttttttttgatatggagtctcactcagtcgcctaggctggagttcagtggctcgatcttggctcactgcaacctccgcctcctgggttcaagtaattctcccgcctcagcctccctgagtagctgggattacaggcacacaccaccacgcctggctaattttttgtattttagtagagacggggtttcaccgtgttagccaggatgatcttgatcttctgaccttgtgatccacacgcctcgacctcccaaagtactgggattacaggcgtgagccatcacacccagccgaggctttgtatttttaacaagttttcctgggataggagtcactgcagtacattattaattcccttcaagctccaacaactcatgtcagcagatctcaaataaattacatgggaagggggagggagctctttgtggaataccatgaaatgcgaataaggtgaactcctcccttatacaaaccagaaggaatcttagtagcaggaaatgactacattccatatatggacatttatcatcaaagcaccaaaagacagaaaatatttttgagaaatcacattagcaagatggaaattgctgaaacccaagtgtccaatgtaataggagaagttgtctgattggttgcccagagacatacagaggtgtacaaactcacaccctgatactcattcatttttcagcaggcctcaggagtttaagatctgggtaaaaatctggaaacacagtcactaattttgttctgccctgttgccatttaacagaacatggttgcccaactcagtggtccccaggaagggagttagagaataataggaaacctccatcacattcagctctgtccccctgtccccatgacagagccagtgccaggccaattatgaaagtctgccagcctcagcacaatgctttgaaagaatgcgcatgtgatctcaagagggtcctgataatatccctgttgagtgagacatacatgagggcaatcatagtaaagaacaaggttcaagtcagacagacagacagacctgggtttgagtccataataatacgacttctccctttcccttctttccttccttccttttccctttccctttcccttccctccttctttccttccttccttccttctttttctttctttctctctctctccctccctctttctttctttttttttttttttgacggagtctggctctgtcgcccaggctggagtgcagccgcacgatctcggctcactgcaagctccgcctcctgggttcatgccattctcctgcctcagcctcccgagtagctgggactacaggcacctgccaccatgcccggctaattttttgtatttttagtagagacggggtttcaccgtgttagccaggatggtctcgatctcgtgatcccccactctcggcctcccaaagtgctgggattacaggcgtgagccaccccgcccagccgacttccctttcaagtaagattgctgtgtggattaaaagagaaaaatcagtgtgaaatttatcagcagtgtttgaagctctatacatgagaccattttttggctgtactctctttataggtaggaggagacttgtcagaggtcacacagaagcctagtggcagagccaggacaagaacccattaccttgacattagagtaatgaaaccctccatgagcccccatcgttccacaactctgaaattccaacatctgtttgctgttgggcttttatttagttggcaaacactgatttgcatttaatgccactcccttgactaggtactggggatatggaggaggataagacataaagataatcaccatgggccaggtgtggtggctcactcgtgtaatcccagcactttgtgaggccgaggcaggcggatcacccgaggtcgggagttcgagaccagcctcaccaacatggagaaaccccatctctactaaaaatacaaaattagccgggcctggtggcgcatgcctgtaatccgagctacttgggaggctgaggcaggagaatagcttgaacccaggaggtggaggttgtagtgagccgagatcgtgccattgcactccagcctgggcaacaagagcaaagctctgtcaaaaaaaaaaaaaaagaaaaaaagaaagaaagaaaagaaatcagatgaaggtgctaagtgggccctttgtttttctcattctacagcctcaaccctcccttggctttatttatgttttgctgatgacattcaaatctacatcttcacagcaatactttcctaccttcaaactagaatatccaattttttcctgcgagtctccatacaaccagaatagaatttgttgttgtctcccacaaatctgcttcttctctgatgaaccccacccaggtacccaagccttgagtacttgtttcctacatctcactctccccaaatcctatggattttgctgcctaagtatatagtactttgaattcctttatttatctccatttccagagtttgtagcctagccccggccactgtcatctcttccctgggcgtgaaacagattcagagtcaggtgtcttcagtgaccaggatatgttggcctctgtcccccttccaggacttggcacgtgctgtcttctctttggaactctcgccaccactcctgatctgggctcgcgatttcgttccggaagctgtccctgttctccgccccgggcttctacattctacagcccatcacttttccctgtaccgtaggaacagtgtttgtcttgatcacttctctacctagtaattagccgcgcttagtactgtattcattcatcacatgaatgaatgaagaatgaatgacagacgggtcagatcaccgaaagcctcaaaacgcccacaaggaaatcggtcgcactttatcgccaggacttaggccagtgcctggaaaggccccgaggcaacgacacggtcggctgcccaggctggccccacttcacgggcccgctcgcttccaccctggacaaagtttggccctaatcgctccccgttgtagctctaactggctccagtctcactggcctacatgccccgacaccggcccgatctaaaggcagaagatccggaaagtctgggatcagtgcgcgccagcccaaccccctcactagacactagttgccccgctcctacgaagggtttcagccacaaggtctcccggcctccggaattccaatctcttgccagacccctccctcacatcgttcctcccgaggaaacgtgacccatgccggccgccgtggccgccccaacctactagttcgcctttcctccgcgaacggttctcccggccctcgcgccgctacccaggctcagggggcggggcctcgatgcgacccagtgcgcttgcgctgaccgccccggctaggcttaaagagcaggcggggcagagacccatacctttggcgctgagtcgaggccaggaaggggcggtcgatgagagggcggccttagcattaggagtgcgtcggctgcaccctggcggatggaccttgggaaggaggggaggggaccatcggggtcggcggggagctacgggtatgcatagctcatagagcgtcagagctgacgacgactagtggaagatggggaaactaatgctcagagcgggacagtcactacctcaggggcacacaattgataagggtgggggtggccgtggtaatggaggccccaaggaggggcaggggcccatagtacgtcaggggctgagcctgtattagaacccaggcttgtttcccagcccagccaagtcccagaaaaatccccctgattttatctatttttttttaacctgggataccagcagggaaagcattagaggcaaaaggaaaggattttcatttttccaggaatgctgaagtcaggactgtttgaggggagccctgtgtttctcagactctcttgtaccgtttacatcaggatctggggcagtttttaaaaatatgcggattcatgattcctaccccccacctcattgcttggcagcccccaggtgccttccctgtttcttccttctgggttgtgataggcttgtctgcagtccgaagcacctgatacgaattttagttaaatggaatgtatcagtccagcttctagggaattaaccataaataagacacagccactgctttcagtctgataagataggcaataaactgcctttctgaaggaatcagggatggtttttggggtcttgaaggatggataggaaggtataggtagtgaaggaggtaggggtagaggtgagaggctgggatggggacagtgttccaaattgcaggaacaaaagcagcaaaggctggctgggtgcagtggctcagacctgtaatcccagcactttgagaggccgaggcaggtggattacttgagctcaggagttggagaccaggctgggcaacatggcgaaaccccgtctctactagaaatacaagaattagccgggtgtgttggcccgtgcctgtaatcccagctactcgggaggctgcggcgtgagaattcttgagccccggagacggaggctgctgtgagctgagatcacgctgcagcactcctgcctgggtgacagcgtgagaccctgtcctaaaaacaaaacaaacgagcagcgaaggcatataattctgagggttgctcggcttgttttacagacactgaggagtttggtgtggataatgaggaagggcctgagggttgcaacaggacttaggcgcttaggcttggagaggtagcctcagacgccagttccactgagcaacaggagctaagggctttaagcaggggaaggacatggttagttttgtgtgttaggcactggttacagcgtgacaaatggtttggaagtggggagatgggccagagaaagcagagagagttaagatgtgagatcatgaggctgtagccagtgcagcagctgtggagatggagcgaagcgaacagatcaaagaaatttaggagtgagaactcctagtgatcgtaaatcagtggcccaacccagggaccaagatccttttgactctttttttttttttttttttttgagacggagttttcgttgttgttgcccaggctggagtgcagtggcacgatctcagctcactgcaacctccacttcccaggttcaagcaattctcctgcctcagcctcccaagtagctgggattacaggcgtccaccaccacacccggctaatttttgtatttttggtagagacagggtttcaccatgttggccagattggtctgaaactcttgagctcaggtgatccacccgccccagcctcccagagtgctaggattacaggcgttagccactgcgcccggccccttttgactctttaaataaaccatgtacattatctgactacaggacaggctgagtcctccagtctcccgtgtgtggtcacgggatggggggagatggtggcagataggtgtctggttattcccagaacaatgtttcctgatgtcctttcctcgttggcttttgtacctgaggggataagcagctgttaactagaataggccccaggtggcaggaagaggctcctgggtcaaccaggaacaaaagaagctatttctagtgcagcatgaaattaaaaatcaaaagcatgacccagggttctctgtgcaggttcccctcttccaagacgggtgccaagtgatgagtatcaggtgtctatggtgagatttggggaggatcccagaccttaacagccctttggttgaaacctctcacaatgtggcaggtaagatgtctttattcccattttgtagatgtggcagctgagcctcagaagttacgtgacttgttcaaggtgacccagtttgtggtaggactgggagtgaaggactcttgactaagaatctttccagggagcgtttgccctttctgcactctctgcctgggtgctttcctccaaaatcctggcatgactggctcctttggtcattcagatgtttcatccctggaggctgccccaccctataagtctatcacgttatccttttcttttttttgagatggagtctcactctgttgcccaggctggagtgcagtggtgcgatcttggctcactgcaacctctgtctcctgggttcaaacaattctcctgcctcagtctcctgagtagctgggattacaggcacgtgccaccatgcccggctaatttttgtatttttaggagagacagggtttcaccatgttgatcaggctggtctcaaactcctgaccttgtgatccgtccgcctctgcctctcaaagtgctgggattacaggcgtgagccaccgtgcccggccttgtattttcttcatagcagttattcatatctgaaattgttgcttttatttgtttgctgtttccctctgctagaatgtgagccccatgaaaatgggccatgtctgtcttgttcaccactttacccccaggacctgactggtgcctgccacgtggcagatgctcaataatatttgctaactgatggaaatagtttggggagagagaaagagaaggaaaccaacatttaatgaaagctgaggatgtttcaagtacttctcacaaattacctcatttaatcccttcacagcctttcaaggtagaaatcgtatctccattgggtgaataagaaaccatgctaagtcaggtcaagtctgtggtttgttacttttgaggctatagactcgtctgagatccattagtataaaattttgcatcagctacgtggaggaattcacagaccttctcaggctcacttggggatctcagatcaagacacataggattggggaacttgcccagggtctttttggccccaggcctttgctggatcctcactccctggcaaggatggagtccatgtagtggactgtagggaacctgctgaagattccggagcagagggagatgatttgccctgagcctctggtgtctcagacctgagtttgaatcctgactgtgcagaagtcatctcacctctccgaatcccactttcctcattttattttttttctttctttcttttttttttttttgagatggagtctctctctgtcacccaggctggagtgcagtggcacgatcttggctcactgcaacctctgcctcccgggttcaggcaattctcctgcctcagtctcccgagtagctgggattacaggcacatgccaccatgcccagctaattttttgtatttttagtggagacagggtttcaccttgctgtccaggctggtctcgaactcctgacctcgtgatctgcctgcctcagcctcccaaagtgctgggattacaggtgtgagccaccgcgcctggctttcctcactttcaaagtgaaatctgttttttcctaacaataactaccctttattgatctggtcgctaagtgtcaggtacttggctaatgactttacagtcgttatctcactttcccttacctccctatcacatcagtatctttatagcctccattttacagccggggaaaggaaggcttgaagaggtatcctgacttgccaaagatcacagcagcagtgtcagccatggtgttcccacatatgtaccttgggacatgccatgggctcagacttcccaaagctaactgttgaatcaatttcatcctctgttcttggggtttgtgggaacatttgggtctgaattaggtgaaaaaaggtatgcagggatgtacttcactgtgaatggaggccaatcccttaattttgtgtcttgcctttctccctgcgagggcctctctccaagtctggactgtgggttttttttgtttttgtttttttgagatggagtcttgctttgtagcccaggctagagtgcagtggcgccatcttggctcactgcaagctccgcctcccgtgttcatgccattctcctacctcagcctcccgagtagctgggactacaggcgcctgccaccacgcccgcctaattttttctatttttagtagagatggggtttcaccgtgttagccaggatggtctcgatctcctgaccttgtgatccacccgcctcagcctcccaaagtgctgggattacaggcgggagccaccgcacccagccactggactgtgccttttgattggaacatctctgtcagccccagggtctgcatcacacatggtctgcatctgtgcacatggctactgtctctttttagcagtgatatcaccctgcctcatactgttgtttatgaggccatctccccacctggctgggggccactgctttggccattcagagtggaattcctctgtcttccagcccctagcacaggcctgggccagcattgctgctcaggaaatgcctgtggaatcaaagtgaggactgtcccaggtgttgaggatttactgtatgctaggcctgtccctgacactttatatgtgttatctcatttacacccccacagtcatcctgggagggagaagttactctgcctattttaccgagaagaaacagactaattgaagttgggctttgccttaggccctcttgtggtggttgatggcacgagggccaactctagggtctgtgccctggtcgtgtttgaggtgtgtgggctgaaaaagggaagacacacttcaaggctccagggatcctcagagaccttctactaacaggttcccagtccggctctcatttcatccgtgaggacacagaaggttagaaaggggagataacttacttatagaccctcttctccacttgttatatacttatgtatccacttactttttggcaggatggatctgttttgactcaacattgtaccacccatgtagcccagtgcctaatccaggttgatgcccagtaaatacttttacattttatttattatgaaaccactgagaaaggtataaaaattaacagaacaaatacctgtgtacctaccatccagcttgcaaaataaaacactgctaatataaagacctttttgtttccctccatgactgaccccccaacccaagaagtaaagactctcctgatttggtgtttattattcctatgcaatgtttattgagatataattcatgcaccataaaactccccctttaaagtgtgcaattcagtggttcttggtatatttacaagattgtacaaccattaccactgtctcattccagaatattttcatcaccacagaaagaaacctcatccctattagtagatactccacaattctccttctccccagcccctggcaaccagtaatttactttctttgtctatggatttgccttttctgaatatttcctgtaggtggaatcctacaatctgtggccttttgtaactagcatctttcacttagcataatgtttgcaaggttcatccatgttgtagcatggatcagaactttattccttcatatggctgaatagtctttcattgtacagatatatcacactctgttcctccactcatcagttgataggcatctgggttgtttccactttttgccattaagaataatgctgctatggccaggagtggtggctcatgcctgtaatcccaacactttgcgaggttgaggtgggaggatcacttgagctgaggaattcaaggccagcctgggcaacataaggctctctacaaaaaaatttaaaaattagccgggcgtggtggcatgcgcctgtcatccccactactagggaggctgaagtgggaggatcacttgagcccagtaggtcaaggctgcagggacctatggtcacgccactgcactccagcatgggtgacagagcgagaccctgtctcaaaaataattataataatgctgctatgaacattcatgtacaggtttttgtgtgaatgttttctgttctcgtgggtagatacctaggagtggaattgccgggtaatatggtaagtatatgtttaactttttgaggaactgctgttttccaaagtggcagcaattgtatcagagctccaatttttacatcctcaccaatacagttatccctctgtatctgtggggaattggttccaggacctcccatggataccaacatccaaggatacttaagtcccttatataaaatgatgcagtgtttcatatatgcttaagtcccttatataaaatggtgtagtgtttcatataaactatatgcatcctctcatatgctctttaattttgttttattttattttaaatttaaatttatttttatttattttgagacaaggtctcactctgtcaggctggagagcagtggtgcgatcatagctcactgcagccttgaactcctcggttcaagggatcctcctgtctcagcttcccaagtagctgagactacaagcgagagccaccacactgtcctttccatgtactttaagtcatctcggccgggtgcagtggctcacgcctgtcatcccagaacctcaggagaccaaggctggcagatcacctgaggtcaggagttcgagaccagcctggccaacatggcgaaaacccatctctactaaaaatacaaaaattagctgggcgtggtggcgcacacctgtagtcccagctattcagggaggctgaggcagagaatcgcttgaaccccagaggcagaggttacagtgagctgagatcgcgacactgcactccagcctgggtgacagagcgagactccgtctcaaaaaaagaagtcataaatgctatataaattgttatactgtattgtttagggaataatgacaaggaaaaaagtctgtacatgctcagtacagttgaaacattgttttcaaatattttcaagctgcagttggttgaatacacagatgtggaacccatggatatggaggtcccactgtacttgtctgattgtggccatcctggttggtcattgtggttttgatttgcattttcctaatgacaaataatgcgcatatcttttcatgtgcttattggtagtttgtatatcttctttggagaagggtctatttaaatgttttccttatttgtaagttatttgtccttttattattgggttgtaggaattctttatatattcaggatagtagatccttccttatatgtgatttgccaataatttgtcccattctgtggatggtcttttctgtttttcgatagtatcttttgaagcacatattttaaaattttgacgaagtccaatttatttattttttcctttgcttgtgctttgaatgtcatatctacgaaaccattgcctaattcgaaggtcacaaagatttacacttactttttctaagagttttatagttttggctcttaaatttaagtctttgattcattttgagttaatttttatataggatgtgaggtaggtcttatgcatttttaccctcctattaggtgtatttctaagcaatatatgacactttttcatggtatttgcacttttaagtggtaaattatatgattcttgtgcagcttgcttttctctttcagtgttatatcaggagatttatccatgttttaaggggaaatagttcattcattttcactgctctataggtttcattgcataaaaataccaaagtggcagcaattgtatgagagttttgtttattctcctgtgaatggtcacttgggttctctagtattttattactatatatggtaaaaagactaatagatgcctcctgtgcagtgtgttgaaggtcgtgagcatattcagacttacaaggtaatacaaagtttctttcccaaatggttttgcaaatgtgcactcctgccagcagtgtattagaattgccctcattctgcatcctcaccgagacagaatggtcaaggtttctagcttttgtcagtctagtgatgtgaaacggtgtctcgttgtgattttccagattaatagcaagatttgtttttcagtaagtgtttacatggttggatggatgaatgcatgaaagcagaaggggcccagaataaccctttactctgcctgttgttggaggatggcagggctctgggcctagactatgtggctctctgtagggacaccgtggagctagagaatgttgggggcaggctgacaactctagatgtgggagaggacggttgtcaccttgaaactagtgatgggagcttctctctacccagggagaggctatcgtcctgctcttccatctccttgaattttccaagaagggagggagtggagaaagagtgaagccaaaagagaattcctgggactgggcgcggtggctcacgcctgtaatcccagtactttgggaggccaagacaggaggatcacttgagaccaggagatagagaccagcctgggcaacatagtgagatcccacctctacaaaaaatttttgtaaaattaaaaaacaagggaattgcctaaggatgagaggtcacagtggcctaagtgacccttaggaatgaccctttttctgggactttttcatgatctttatattggtgtgacatgaactttccttgtttaatctactgagtttggagatggtcttaatgataataagaaaatgaatagtaatgattatatgttgaactcttatgtgccaggcacttacgccttttctttttaaaaataggtattatctcattcaattcctatgggacaggtactattagtattcccattttattttatttttaaaatagggatgagtctcactgtgttgtctaggctagtctcaaactcctggcctcaagtgaccctcttgccttggcctcccaaagtactgggattacaggcatgagccaccgcacctggctcattcctgttttatagatgaggaatcagaagatcaaagagacagagcaactctgagggtttgcacataggcagttggactccagaactcttaggcatcatgctgtgtggttaacctggctcagccgaatccactagagcaaagaaaagagaggcttgcccaggcttgggtgagaaacaggagtcagaatattcactgggcctggcctgagggcgcagcagggagcagagcgagaggccgctgggaaagatggttctcaaaagcagaagcctcacgccaggggacatggcccatcagcaagcacatgggtgcctcttctgggcatgctggctgctggggacccagaatgggatctgtctgctcctgggtctcaagaaagacctgtcttgtggggtagacagatgataataagcagacttacccataagtgtaatacactcagaaatggggacatgtgatacagagggtgaagagagaacctttatagaaaggacctagtttagttaatgtagtcaaaggaagcccctttgaggaggtgacatttgagtggaggctcgagaagaaggaagcagccatgccccagtttggggaaagagtaaatggcagatgcagagtccctgagacagaaaggagctggtttagttgtaaactctcagaaggccactgtatctggagtgatatgaatgagagggtggggctactgtagatgggctggtcagttggcagggccaggtcaggctgggtctccaggccagggtcaacatataggtctatagccaacatgtttaaataaggcccataagactgtcttcttgctgtccctgagaactgggtgtttgcatatttggaagggactgaatcctgatgcctaggctgggaaagagggtcggggggtggggagaattcttggcttctggccctagaaagctggaacaagaatttggaggctgcatcccactgactcccagatgggttggagggtgggtggcctcagccaccagggccctgtgataaggtggcaccacatactgatagctgtccagatatccttccacaggtgaacggttcatcaaactgtggcgcatccatacataccatgagtaccactcagcaataaagacacaaacatgaaatgagcaacaccttggaagaatctccagggacttatgtggagtgaaaaaagccagtctcaaaagagtacatcctatatgatttcatttatgtaacattttggaatgacagttttagaaacagaggacagactggtggttgccaggggttaaagatgggagggaagttagtgtggttctataagggcaacacctttttattgttagaactgttcagtgtcttggtggcagtggaagatctgtgaattgacacgggtgatgaagtcgtatagaacttaatacatgcagatgtgcgtgcacacacacgctcacaactagtacatgtaaaactgggaaaatctgaataagatcggtacattatatcaatgtcaatagtacagagttactgtactattgcttacaattgcatgcgaatatacaattatctcaatagaaattttaattaagaaatgaaatttggctaggcatggtgaggcacgcctatagtcccagctacttgggaggctgaggcagggggattgcttgagccaggagttcaaggctgcagtgagctatgattatgccactgtactcgaacatgggtaacagtgataccttgtctttaaaaattttttttttaaaaaagggaggctgagcacggtggctcacacctgtaatcccagcactttaggaggccgaggcgggtggatcacgaggtcaggagttcgagaccagcctagccaacatagtgaaaccccgtctctactaaaaatatgaaaattagctgggcatggtggcgcgcacctgtagtcccagctactggggaggctgaggcaggagaatcgcttgaacccaggaggcggaggttgtagtgagccgacatcacgccactgtactccaggctgggaaacagaacgagactccatctaaaaaaaaaaataggaaatttaaggcccaaagcattagatagaatgatagagatatttgtactaataaaattttcagcccatggaaaaaaaatctgaaggctctgctcaaggaggtctcttgtccttgagttagcaaagtcacagggaggtaggcagtgtgcccccagctgtgggagcaagcagggtcaccctcaggacactcaatatagagcggtggtaccctcagaccctctgggtaggtttcccagcttagccttttgggcctccctctgcccctcacccctcaagctgattgaccacgatcacaagggtagagcagagctacagcaccccccgccctccactgctgcttggtctttcatggagaacagacattctcctgctccccactccaccaggttaggtaaggacccttcctggggaggcccctgtgtcaactgtgcttaaccgtctgtgcctgtgtgtcccccagcagcctaagactcctgaaccttcagaacaaacctgatgccaattccaacctggagggcacgggagagtgtttgtttgaagcactgaactacatgggaaactgaccaagcctggggcaagcccatcctgagaccccaggcagggcctcagctttggtccaggatttgtggggtggttttacaagatcctgggatttcacatgtgggccccactaagacctctcttccagaatgttggctgcattgggcactgtctcaaattccacctacagagtggcagacccaaggcttcccgccatagtaccccaacacccacagagccacagctgcatcctcaaattaattgacatcttcccatgggctgagcactttgtttcatttatttctctcaaccacattacaaggtaggtcttctttgtgtatttattttgcagagaaggaacccagggctcagagaagttacgtaacttgcccagggtcactcagcttgtaaatggcagagcaaggatttgaaaaggcagtcctgacatgtggcaggcctgaacgagtccctgcagatgcaaagctgaaggagaaacattgcctgctcttaaggagctaatgataatatcaccagatatttacatagtgcttatgatgggtcaggcacaggctaggctctctgcatgtgttatttcattgaatccacaccacaacccagtggaataaggttatgcctgttttatgatggaaattgaagctccgtgaggaagagggacctattcaaggtcacatagtgagttggaaagtctgacctcctcttgttggcttcttccatcctccaggctggcctcccaggcccctccctgctcgtggtctgtacaccccttctcccttacactcggctaagccttgtccatggcccctgcccctttcatgtctattcttagcatagtttggagcctgcggttgggccacattatctggatggtgacccctgggggtacatcttctaccccagtgtgtcctttagcccttcctgtctcttccagctgtgcagcaaggggcgtgttagaggggcccactacccaggcccttacactgcggcagcctacctaagtatgcacagcgcacgtagcgtagaggatggagcccgcaggacacccttaatgcccttacctggcagggaggccagcacacaaggggctgggggcgggactgggcttcttggggttgagtggttctggaagccgatatgagcagcagcaactgctggcattatctaggctctaagaatagcttgggatgaagagtcagaggttgaggccagggaagaggacaggagcctgttcctactgccccctcctgctgcttggcctggaagctgggaagcctgcctcctggctcaccatttgctctgggatggttttgcatagacacatcttgtccaccactggactggaggaaagagggtacccctgggactcagacctaggctgcttgacctcaggctgaaggcagtgggcccactctctgaggaccagccctcacccaggcccctcaccactggcacagagtaggggtttgtatttttcaaggatcatgctggaagtgacccttattcatttagcaaacactttaaaaataggttatacatacacgatttaaagttcaaagggtttacaagggaaaaaaaatcactctgcctcccttccctggcccccagctaccaaacactgttaccagctttcttgggtgacttccaaaggcagtccatccatagataagcacacagatgcacaaatgtctctctcccccgatttttacgcaggagatggcatagcccatacattcttctgctccttttttttttttttttttttttgagatggagtctagctctgtcgcccaggctggagtgcagtggcacgatcccggctcactgcaacctccgtctcctgggctcaagcagtcctcctgcctcagcctcccgagtagctggattacaggcacctgccaccatgcccagctagttttttgtatttttagtagagacagggtttcaccacgttggccagactggtcttaaactcctgacctcaggggatctgcctgcctcggcctcccaaagtgctgggattacaggtgtgagccaccgtacccggccacaacttttttttttttgtaacctaatgatctatcttggaaataacagcaatgacatattgagtctccactagtgtcaggtactattctaagcattttagatggtttaactcatataatgctcatcacagcactaggaggtaggtcctgtttgtgaatctccaccattaagaggtttagtcattctccaagacttcgtgcctggtaactggcagagccaggactaaaacccaggcagcctcactttagatgaggtgctccttcctcactgctctgtgctgcctcccaagcttgagacatgttgagactcacatcatgccctccctcttcctaagggccaaggtaagccatgtacggtgaacacttaccacgtaccaggctgaggctgggctactgcagtgtaagggagaccaggcctctgtcctcatggaactgtcatcccagtgcccatgagtgtctgccagccaaggcaggaggagggaaacccacttgtctcatacccatgtgcccttgtataggtctgctgttcagacacaccctggtcccatgtccactagtcctgtagtcacaccgcctctgagctggaaggccttagagcccagagttacagatgggaacataggggcccaaacagaggtggacacgagagatcatcaggtggccctggtgagactcatcccctgcctcccgggatctatttcagcagggtgggtggggggtgactttaatccagggcccaaccattgtttgaagttggaaacaattgaaggacaagggagctatagatagatccacagctgctgtcacttgtcccagcctgggcactgggcctgagcattgtctacagaggggcactctaagcagtgaggcccactcctgggggtaggaggttggcccagcccagctcagctcagctcggctctagagataaagagtcagaggccaagacagaaatacagagtcttggaaggcagagagtgggacaggacaacatcgaaagaacaagacccttgagagatacgatggactcccatcaaatatcgacaatactcagactggctgggggtgggagggcagacgcagggcctgagccacaggttgaactcaaggatgcggcatgtcagagacctggaccagagtgggtgctggggtctggagcacctcagcccagctcaggtctttctgtccatccctccagaacagctgttcatgttaatcactcttgggggcagccagtctgaggtacccttgtgtgtgctcggggaggcctcaaggtcttccgaagtgagaggttgtgctgtcaggcctggtcatggcttgaattcactgtatgacatcaagcaaggacctgcctctctctttgcggctcagtttccccagctgtccaatgagagagctggttggcatgatggctgaagggccccttcatcctccaatgatgtcaggagatttccttttatgtgtctaactccctcctcttgctgtggctgaggtcgcagtcccctcctttctttgtcctttgtgaagatgggggacagctggttccccaccccctccccccagtaacctttcagccataaatccatgctgaggcatctctcctctggataaacagccctgatgccttttggctgccctcgtcctattttttgcttcaagcctcagagctggggcccacttgggccctctgcagctgcccagggccccaggaggggtacaaacctgggacaagcaggggcccaaccacccccagtgtgccagggtcgtgggcccctttctgggcctcaccaccttgcactgggaccattatggcagcctcctcctgagtccttcttcctgccaccggcctcaccccttcagtgcatcctccacaccagctgccacagggagcttaggaacacataaatctgaccacactgtcaaattccgtcgctcagagctctttgatgcaaaaaataaataaataaaaatgcctttgatggcgccccaactcctgcaggataaagctccagatctgaatctggcctttgaagcccttcacagtccagcccactacccagtcctgccccactcccctttatgcccctggtggcccagctgcagctggtggggctgcttgggcccatcttcaccccctaccctgccttggagttctaggtcatgctgtccatttcctgtcccctcttgccacctccatgccagacccatccgctctcacccgggtgacagcagcagctcgccccgctgcctcccctgccccttccaagccgttcaagtggtcactatgaaacttcagctcactcacatttctgctctcacaggctccctttgcacttgcaatacaaccctgggtcccttccaagtccttcaaggctctgaatgatctgcctgtccaccctcaccttggaaaactctccccttgttgaccactaggacggcaccttaaacatcccaagctgttttctgcctcatggctattgtatttgctgttccttctgcttggaatactgttccaagggcttcccgcctcaccggcttcttggcactctctggtctcaccttcagtatcgcctcttcagagaggccctccctcacccaccagaacgaagtacacgtaccccattaccctccaggccatacttcttgtttcatgcttaccacttgccacaatctttaattaccttaaaaatgtgtttgcttgtttattttttgcttctccaggggagtgtcagctctatgagggaaggaaccttgttgccatacccctcttcctggcagtctgggtgtcacacttgtttgttttgagtcagggtcttgttcctgttgcccacgctggagtgcagtggcatgatctcagctcactgcagtcttgaactcctgggatcaagcaatcctctcgcctctcagcctcctgagtagctgagattgtaggcgtgtaccatcatgcccagccaatttttaaattttttgtcgagacagggtcttgctatatcagcctaggctggtcttgaactccttggctcaagtgatcctcctgcctcaagccttccaagttactgggattatcataggtgtgagccatcatgcctggttaattttaaaaatatttttttgtagagatgtcacagggagcttacaaacacataaatctgaacacactgtcaaattctcttgctcagagctctttgatgcaaaaaataaataaataaaaatgcctttgatggcgccccaactcctgcaggataaagttccagatctgaatctggcctttgaagcccttcacactccagtcccaactgctcagtcctgccccgctcccctttatgccccagtggcccagctggtctcaaactcctggcctcaagtgattctcccaccttggcctccaaaagtgcagggattatgggcataagccactgcgcccagccttcaaactagcttttatccttcagactcctccgtgttgatgtcttccttgagtatctttcctttcctagacaatgagtgtcttttgttccatgtgtccctcccagctgtagaagcattattcacagagtccttcgatgtctttacccaaagaagaaattccaggcattgggttacattgagggcagatacattttgggctgggatctaaaatcctggagtctcgctctcctgaaatcggaacgaacttcaaaggtcatccagttcagaggcctcagccctggtcgacctctgcctgagtcttccttggtgctggcaggctcactttcctccaaggcagcctctcccgctgctgatgggctgagatggtgaaaagtccccttttgcatgcatccgcatcctgcttcctgtcgctgcccatggatctacttttgaggctacacaagtcacatcagctccctctgctccaggacagctcttcaagtttttttgattttttgttttttgagagggagtcttgctctgttgcccaggctggagtgcagtggcacgatttcagctcactgccacttccagctctcaggttcaagtgatcctcctgcttcagcctccccaagtaggtgggattacaggcacacgccaccatgcctggctaatttttttttttttttttgagacggagtcttgttctgttgcccaggctggagtgcagtggtgcgatctcggctcactgcaacctccgcctcccaggttcaagtgattctcctgcctcagcctcccgagtagctgggattacaggcgcctgccaccatgcctggctaatttttttgtatttttagtagagacagggtttcaccatgttgaccaggctggtctcaaactcctgacctcaggtaatccacccgccttggcttcccaaagtgttgggatgacaggcatgagccaccatgcccagccttttttttttttttttttttttaagtagaaacggggtttcatcatgttggccaggctggtctcaaactcatgagctcaaatgatccacctgcctcagcctccgaaagtgctgggattacaagctcttcaggtattgaaagtcagtatcttacttaagtccttgcaggttatagtatttgttgcaaatcactcagagcattgggtttcctctttgcgttgtcatgtttgtttgtgagcttatctcagcaggaagatgcaccctgggtggtggaagggaacctacgaggaagatctagacccattttgaggcttggtttctcagccccaggttcatacactgagtaggtaactctaggactcagacccacatgataggtgtaagttagacttgctagaggttctgattctccaggctaattctgttggtccctgacaagaaaccctaccttctgagcatccttgaacaatgaaaagaatttttcccactttctgggctttctataaattgctccagcccagctctccagcctctgatgccataggagattaaaatcctattatctatcaggtttggttcgttcacttactaggtatttattgactttctatgatgtgcaggcacttggcaaggtgccggggacacagaccaagctcctgcccttgtgcaggtcttttctagtggcaggaggtaggcaaggtacaatctaagctctacaaagagaattgaaacagtgaggttctcacagagacaatgcggagagaaagaagaaaggaatacataatgtaggattccattcaaacaaattctgaaaatagacaacactaatctctgaggttagaagtcagtattatattgtggatcaagcaagagtcggtataaaaaaaataaaaataaaaaagaagtcagtattctattatcctaggtgagggatggcccgaaggggataatttttcataatttctgtttttgtacagggtacggttttgttttgttgttgcttttgagactgggtctgttgcccagctggagtgcaatggtgtgatctcggcgcactgtaacctctgcctcctgggttcaagcggtcctcccacctcagcctcctgagtagctgagactacaggtgcatgccaccatgcctggctaatttttgtttgtttgtttgtttgttgtagagatggggttttgatgtgttgcccaggctggtcttgaactcctgagcttaagtgatgtgtccgcctgggcctcccaaagtgctggaattacagacatgaggtactgtgcctgacccagggtatgtttactttgagaaaattcatcaaactttataagatcattcactgcagccttgactgtaatggcaaaagactgaaaacaatcgaaatgtctaccgagaggggacccgcgtcatttcctaatggagacacactgtaggactaattcctaatagggtctgggcggctgtaattttgataaatatcgccaagtttggcactgtaatttttttttgagacggagtctcgtactgtcgcccaggctggagtgcagtggtgccatctccactcactgcaagctctgcctcccgggttcacgccattctcctgcctcagcctccagagtagctgggactacaggcgcccgccaccacctctggctaatttttttgtatttttactagagacggggtttcactgtgttagccaggatggtctcgatctcctgacctcgtgatccgccctcctcggcctcccaaagtgctgggattacaggcgtgagccactgcgcttggccggcactgtaattttaaatgtgttcatgtaatatgcacacagtaaagtgcatacatcttagatgtacagcttgatttgttttgcaaagtgcacgcacctgtgtctcatggctctactcagcgtatagagcatttcctgcctcccagaggctctctggtgcctccagccattaccctccctcagaggaccactctgccacttctgtcaccataggcgagttttgcctgttttgaatgtagatggttgaaaatgtagctgggaaattatttctctatatttcgtctagcacacctgtgcatttggaatgggagcgcatcggtcggaggacttcccgtgtgagcctggtctggcctctggctggaaccctggatctggaactccattgttccatgtgtctggcgtctgaggttctcagatcctttcattctcgattctaaaatcctgtggcgtcacggagccctgaatggggtgatggacaggagagcctggaggtgccctgacacattccaaagactgtatcaggcagatggactgccagcgccctgaacctctgtcgagagtgggccacgggaaggtggcttcctgtgaatcttcaatgtggggatctgaaggggctcctaactgggttacatttccttgatttgcttccatttcagccaaacaattccttgattctataagttccagggctggttttcttcatgtatgatttccccagggggtccccagaaagaggatggggagggaggaagagggaaagagggcatcgatgtgctcccacttccaaatgcacaagtgtgccagataaaatatagagaaataagtgcaaagctacattttcagccatatacattcaaaacaggcaaatctcgcctatggtgatagaagtggcagagtggacctctgaggtagggtacagagtggaggcaccagagagcctctgggaggcaggcgatgccctataccctgagtagagccgaggggacacaggtgtttgcgctttgcagatgtctgagaaggatgtccctctccccctacccctcccccctctctctctccctctcactccttctctttttgatctgttcttctccttctctctccttctctttttgatctgttcttctccttctctctccttctctttttgatctgttcttggccattgctcgtctgtgagacttggccaatgctttcctttctctgggcctcagtttccctggatgtatcaagagggttggactagctggtccaatctcagtaggcattctgtggtttcccctctgagtgtccttgctctctgtatctggaggtggggtatttttctgggtgtgtcagactctgcgtgacttggtttctccccgtgagctcttcagtctcctgaacctcttactgccttgtccctgtccccgtcagtctctgcacccagcctccctgtctctcagtggagtgtctctctccgcctttgtgatcccctgacaatgggaggtaaaaatagcccaggggccgtgctggtggagataaaagggaatttgccttttgtgtcctgtggccaggctgggggggctgtgacacgtggagattgctgacatagctctcctcctctgaccttgacagtggcaataaaaggggtagcagagcttcctgccctcaccgtggtgccgaggtaggtgatcagggctggggttggagccgaagggagggcaggagggtgggcgggtgggtgagggtgcccatgggtggccgcgagtcttctgaatctggagtggaggaagccctggtgtttgagggtgtgcatgtatgctgggcactcacccaaggaggctgcattgggagccagagggagtcgcctagtatctggtcttgtgggttgggggatcgtgccctagttcagctcccttgtcactgccatcttccagtgcctgctgccttgggccgccttgaacctccagggtttccagctcctcctccttcaccccagtgccactgccatgatggatgtgagtgaacttggggagtctgcccgctacctccgccagggctaccaggagatgacgaaggtgcacactatcccatgggacggtaagtggagacagagggggaggggtcatagccacagagatgcccttatggactcagaccaggaattgggaggggtggcaccagctcagggctgaaggggcattggggcctgacagctggagccctggacctttcctgcagagtctggggcctggaaattaaaaccccagggacactgtatatcactgtgtgtctgtgagcaagccttggtttgttcccctgtgaaatgggataatagcacctgccttccggagctgcagtttatgaagactcaggctggagcccgaggcctctgagatgagactgatcggcatgtgtgcaggctgcctccgcgtgtccacaaaacttgtgctggggttatttttagtggtttctgcagagccaaagccaccctttattagggacaggaataaaggctgtactatttatgacctggtttgctcataggacaatactaacaataggcagtgtgtaccgaatgcttattgtgtgtcaggcccagagcagatgactttccatgcatcatctcaacaacctggggaggtggggccagcaccagacctagcttcacagggcgccaggctaagagggaccttgtgtttgattcgacactctgctgttgccgtcttgaaagttttaattgttttcaacaaggggacccacatcgtcattttgtactggggtctgtaggttatgtagatggtcctagatggttctagatggtcctgacccaggcacttggcagagcaggggacacaaactccggtttgcagcctgagtccatgcttctaaccaccatgaaatctgggctcctcaaagctctggggacagctggccaggcaggagagcacaggttacagttaggaggcctgggtttgagtcttcagtgaaatagggaaggcaggacccctccctaagagtcatatgcctgatattgaggggctgctctgtatgggacctaaggagatctccataacattttgcatgtgagggaactggcccagagagaatcagggattttcctgaggtcagagggcaaatatggcggaagcaggaattggaacccaaccattaacccagactcatcctccaataaggggatctctagggaccctcccagctccgcccttcctgagcctgggtttggagggttcttcactggaactcctgggtcctggcagaggggctttggggagggtcacagctgtatggataccatggcttgggaactccagctagaacctggaggtgcctcagcccctctctgagtccagagctctctctgcaacccagggaagaagcgagtctgggtgcctgatgaacaggacgcctacgtggaggccgaggtcaagtcggaggctaccgggggcagagtcaccgtggagaccaaagaccagaaggttccgttccccctttcctgagattagcctctctgtccctaggcctcctggccaacaggatctgccctctggttgaagggggtctgggtatgtgggtgggggtgacaggtgaggtcggtcggttcctcccggtcccccggcccctgacacgatctccc

SEQ ID NO: 944 - DNA, 10739 bp, Homo sapiens
aatgacgctgttcgaataatcatttattgtaacaggtttataagcaaataaatacaccctcctgtcagtgggtaatgaaggcagcttcagagcagacaaatagatccaggtaggaggcgagaagagacaagtgaggaggaaggctccggtcctttgcccgctccgagccagttctgctcgcccgggggtttggcctcgggggtgaaattgacagtctgattaatagagcgcgccgcggcacatttcccccttcatttaggggcatcattacgctctcagtttgctaggttgccccttaggtcctaatcatgcagcgccttcttcatttttccttggacacagatacgtattaaataatagataatggtttgactttccagagtaggtcctcgggaaggtttggtttttttttttttttttttttttttaccatttacaagctgggggcataagtggggggagataagggggaggatgcaggaagagttgcgtaaggagaagaccttgcgcctctcctatctggattacttatctttcggatttcggaaccaaatatgtattttatttaacaaataggacgccggagttctttccctccctatttcttcacctcagcctaaatgctctcctcccaccccgggagagagagagagcggaagagagggagagagggagagagggagaaagggagagggagacggagtgagagaaagagagagagagagagagagagaaatagaaatatcctagagttttgaaagcgctttcttgctacgtggccgcggaggtgcattgggcccgcgcctccaaacggaaatcattaggtcctctctgattttctaacaccgtctgcagagtgagatctgaactcgaagtccccggttttttacttttataatcctgctgatagaaagccttctcgcctacgcattttcctgaggggaaacgaactaggctggacgatttgatagcagaattcgacagctaactttaaacacagtggagatttacagcgccatacgggcgctccgaatccacgctcacgttgccagattttcccctccctcctcaaatagaattatttgcggcaaaggcgctggatttcgaggtcaaaagaggaaagaggagacagccttcttcccctacctccccgctgccctcccttcccctttgcttttcttccttctctctttcctcccctcatcaaccccagccccttacctgcggccacaggtattcccagcgttgggtccgggcgcagagagtcgccgaacagccttacagcagctctctgcggcctgggcttggaggctgagcctcttggcgacaactttgatagtcataatgacgccggtggcaaccattttaacgaagatcaatcttcactccaggccgctcctcatctcccgcggttgcgcccacccttccctgaccctccaagcactgtgcccacccgccaacggcccagccggagagagattcgcggacacaggcggaggcgagggaggacggggatgggacgcggaggtccgcccgtgagcttctgaagcggctgagagaccctgacaatctgggcgctgggcgcgggtcctgcatccccacatttagcctcaatccgaaccccaaccagggccccctcttctttctgccgacacacccagaacattggggtgtgttagggggcaagctcgagatctattcgcctatagctcttggcgctttccttttaaccttagacccgttgggggcgcatcaggaatgtaaggggaagcgaggtgtgaagtatatttatatacatatatacacacatatagtcaatgccaaaagtttatcttctgttccctcggcgccaacttatttcaacaacgcgagctttgcttagaaaatcaattccacatctttaaggtaataaacggaaagctcgataggcaggcggtgcctgggggaacggggaaccggcggggaacgcagagtgggcatccagcgcaccgggactgggacttgacccagcgtccacctctgcccctgccccattggccacccagcttcgagctccctgagttctcattgcgccggctttggggccatcagcgcggtgggagtccagccctgccaacgcccccacctgctccctccctgctccgcagcccggatgcccaattctgccatgcctggcagtcgctgctcctgtgacccaggaagggtccccctacccagtcctcgcttgctccagggactgaatgggacaccttggttcaggctcgggtcgtgctggggtggtgggggtgggagtggtgcgagaccctggcgggagtgtgggtgaaccgaggcactgcttgggtggaaatccgtggatgcctttattgctgtcgtttggcgcccccatctgttttcctcgcggtttcggctgctgtgagttggttttcaagtcggagacgcagtcactggggactaaggtgaggactgacgaccccttcctctatcactcagcccgaggctctcccacatcttcccttcctctgggacccgacgcctctggtcccaaaggctgcgccaaaccggacctcagtctgtcgaaagggaaaacactatttctcagcagcaccttcattcattagtggctttgaaaactatttttgcaccttttaaatgacactgatagtgcatttctagcacgtttattacaaaaaacatgtcagagacatgtcagcgaaactactcacagtaaaagacacctataatgtttccactaaactgggtgtagcaggcaataatgtttcatgaggtacagtgaccattccattccaatatttaatgtcccttaatttatttagagattccacgcccactagtagtaatattggctaacttatacaaaactcttactttgcaattccaagtgctttttacatgttatctcagctaaggttcacagtaactctgtgagatttaaactattatcccttttccagagattatgagccagaggggttcagggacttgtgatttaaacttatctccgatgataaagtcaaaagtgttgtttaaagccttgggcagcattttttaggttaattctctcattttgcatatgccttatgtaaatacaggcctacctcaaaaacattgaacctatatagagggtagtaagaagagtgcagttctgttgatttgtgtgtgtattttgttgtagttgttgttggtggtggtttttgtttgttttgtttgtttgtttgtctgtttgtttttgagacagagtctcacaccgttgcccaggctggagtgcaatggcaagatctcagctcaccgcaacctccgcctcccgggttcaagcgattttcctgcctcagcctcctgagcagctgggattacaggcatacgccaccacgcccggctaatttttgtagttttagtagagacaggatttcaccaagttggccgggctggtctcgaactcctacctcaggtgatccgcctgtctcgaccttccaaagtgctgggattataggcgtgagccactgcgcccctcccctgttgatgctttttgatgaaatacccaaacttgcagtctcccagaatgtgaaggccaaggctggaacaggcctgtcaaatgttccgggtggtttgatgcagcctctgtgaccgtcaaggcctcttacccactaccaaggtacagaacccactagataaaacaagtcaagaatccaacccaagcccgcatgctttggcagaaatttttaagatggggtggggagtacaggaaggacttccttcgcatggactgaaaagccctttttgttctaaaggagtaatgactttgaagaggcctaattttttggttaggtttccagactaaatatttgtttcttgagcagcagcggtcctctgaggtgaagtggtaaacacttttggcctatgactgcaggtaataaaaatctgtccgggctgcccgaggggaggggcgccggtaaagccgtagctgcagcgaagccccgcgtctgccgctgccggagcctggctctcctcttaacgcggggggctgcgggcaattggggccgacaacttgcggtcccgccttgggacgcatgcttgctcgagagctggggctgcagggtgcagtgggacagtaggaccgcgaaagcctgggcttcgagcctcgggctccctgtcttcaggcgaagtgcggtttcccacgggtgcaggtttcgctgcataagggaagactcagatttcgagccctcggcaggccagcttctagctctctgtcccttccgggtctctccggttgcttctgtctttcctcctcccactcccgtcgcaatcccgcgccccacggaggaaggtcgtggtgcgggagttgggggatactttcttcctgggctcggtctacgcagacccatcgcctgcctcgagttcctgtgccctcagacgccacgggaaaacttgcagggacatctagcgccaggcgtggggaactgcgcgccgccgggccgggaaagtggagccgaacactgcccctccgcctccctttcggctccccccttcgtgcttgggcactttcctcaccttcatccctttgccctgccggtaaggacaatgtggattcccatagagacatggactctgcggaatggagataggtaggtagacagacattttcttttatctcaagctaccgacagagtgagaatttactggacttcccagtagttttgctagggaagtgtattccaaggacaacccctcaccttgaaatgtcggataaaacttcagcaaattagggtcccagcttttattttccaaaaaaaggcaacaagttactctgggcctctggctcctgccccaccctcctgcgtccctttcacagtgagattagtgcttctcttcaaaggaaagaatcctcactgtgtttaattttttccaaggctggagaagttctctccatcccaaagaagggcccgctgtcctgcatgaggcaaacctggttccaccaaataatgtttctgatttggagggggtttggaactgttgttgctgcaaacgattttcatttgataaagcctaatcgtgttgtgaaacccaaacggaaatatgtctcaaaggtagaaagtactcaaatgtggcttccactgtctagctgttgctagggtccccttttttcacaataggtttggtttgttgttgttgttgttgttgttgtttcttttgatatctccaggctgagtaaaactgggtgttgcctggagagggaaaattagctccaaagttggcagaacacagatttggttaagaacactgtccagccacttctgctagacttaagattttactttggaattaagactctatttctacaccaaatatttggcttcttacaagttaattaggagggtgtcctgcacttcctgatcttggccatcaagacaagtgctttcaaaggagtccccaggaccccactctgatagaatcctgtgatcctggccttaatggccactgattatgtggttaattgagctcattgctgtcttggcaagcagagcaacttcaataaatctaaatcacagcctgtatctgcccattcccccaaaccaggacaagagcaaaatttgaaagatcatctactaggttgaaaggagagaatatgacttccagaacagcactgatgcttaaaaaggatgcctctggaagaaaaggaggaagaggagcaagtgatgggagaatacagtgggactttgggcaccatagggtcatcctgagtttttcaccaaaatcaggaacagcggcaaaactggtttcactgaagaagacacacgtttggagacatgtgtagtctccaaggattctcacttaacaaagcctatttctgttgttaaaaacccctgcataatgcacccacacacaaacacaaggcttggtctgtgttcctggccacctaaagaaactgattcccagtaagtttaaacctgaatgaaatgtttctgcaaattcagcctcaaaattcctcctctacctggcatccctggcttgtaaactatgtgtctcattagttcataaacaaagcagccctgactttgccttgtactcaaccacagccctaggagccagtagaatttgtccagaggtgctgggctttggagcccaagtggacaaagtcagaccccctttcctcagggcaaagccctcccacagggctgggaccccaaaggctatgctggaagcaggttcagcagcaggatatcaaggggcaaagctcctaattcaaaatcttcctggcttctgaacaaccattaggatggacagagaaaacttttgccctgctctgagaggtcccacagggcttttggaagcagagccaccattgagaaatccctttcaacctgagtagtaattcagatttttctcccactccctgcacaacttaatttgctgaatggaaaattcagccagaagtgatgggctgcttgaaatcaacaaaaacttgacacattcttcccattttcattttactttattgttaaacacataattgatcattaaaatgtacttatcagtgagaaaatgaagcagaagcccaaggcacaaaaccacagggatatttaattttaagagactgaaagtttgttggttctacttatatcttagaaatatttcaacgaatttgttttttggagtcataaaaagttaaaactatcttcatgttttctctgtctgaggaagaaaaaatgagacaaagggaaaataaaagcatttcatggtggcccatggttggtggtttggtaccaaaattgtttcataaagacccagccaaaccctctttaaaagttagcaatcctgtcgcctcgccacagttggcctttttaaaatgctggttgaactttcattgctgacttttgccttcttttcccaaatagtgaaaaaaattttctcatcagcaaacttctattccctatgatttcctgtaaattcaggcccctcccatctcaaatttgatcatgaacatgtctagaacttcaaaacgatgaaacgaattctcttgcttttcctttccaacacccctctcataactttcccctttatttgagccttttatggttactgcgttttgcatgtcaacactcctaacaccagcagcctaccctgaaatgccaggccaggccaaggagggccttcctggctctcttcctcatcttactcagggcatctttggtcggggaacagtggtgctgggtgacaagctttcaccaatcacaggcttaggggagtgattttcttggagatgggctggcttggggagtgcatgccacagaaccaaatgggctctgaaggatcccatatccacccccagaacctgggctcattggatctaatattgttcctaaggcagagccccaaagtcacagcaggactctcattggtgccccattagttgctgagattgagggatggtgggctggagcttctgaggctgaggagcaacagaaagggatgatgagggacagggctgtaatccctaacaccctggcagcttggttccagagctggacctagccccaccagcactgccctgagcccacctaaccccttgaagtcagaccgtttctctgggctgctcctatcacaaaatccgaatttgcttggaacaagcgccctcttaatttgcccctctcagttctctgcagttgacagcttggaaaaggaagcgaaacaaaggtccctgggaaagtgaagttttcaattaatttggtgtgaggaacgggcgggagtgggtggtgactgcaaaatgcgaggccggtcggctgctggagagacacagaagtttcacggtgggaggctgagtggctttctcccccggcgccgttctcagggtctttctgcgggtcgaagaaggacccgcgggagctgagaggcccaggtcggaagcactcccggctggcccaagagtagaggcgaagagcgttgagtaggcatccatggacttttctttctgggacagattgtcaggctcactgcgccgatgcctgtctttcatctgtttaagtctctgccgccagccccaagggcgcttcatgggcattttccgaacggacagcgtgtgtgtataggaagggtctgctccaatgcctcttacctgtgtgaaatgcctttgccgggtaccagtgcacaaggtagggcaaattagctcactcggatttggggtctagaagtcgactaactgagggattcagcaacaggataaaaaaatgggcctgttttcacatcattctgatcatctctgtccttcgtcttcattttgctgtgcaactcggggagccgaggagaggtggcaaaaacagcggttgccgagacaaggcgcaggccttggcgcccgcctcagtcgcagacagggcctgggatgggccgtcgcgcaatcaactcgtgggggtggctgcagcgcgtacgcctgggtcgggggggagggcgggaatgggaggtggaccctgcaaggggcaggagaggggtgggggccggagtgggtgggtccagccaggcctgggccgggagccaggctcccccgcgttcctacccccacgtggccgcgcgcagccaatggcacgcccccggcgggggccctcggggcgggaggcggccccccgaccggcccaggccccctcccaacctgaacttcgtttttataaacgtcccgcgatgagctaacctgttggagggcaggcgggccggaggcgggaggctcacagagggagagagggctagaggaagagggcgggagcgagcgaaccagagagaaaggagaggagggaggaggcgcgccgcgccatggtgtcctgcgcggggccagggccagggccggggccgggccaggccgggccatgagccgcgccgggagctgggacatggacgggctgcgggcagacggcgggggcgccggtggcgccccggcctcttcctcctcctcatcggtggcggcggcggcggcgtcaggccagtgccgcggctttctctccgcgcctgtgttcgccgggacgcattcggggcgggcggcggcggcggcagcggcggctgcggcggcggcagcggcagcctccggctttgcgtaccccgggacctctgagcgcacgggctcttcctcgtcgtcgtcctcttctgccgttgtagcggcgcgcccggaggctcccccagccaaagagtgcccagcacccacgcctgcagcggccgctgcagcgcccccgagcgctccagcgctgggctacggctaccacttcggcaacggctactacagctgccgtatgtcgcacggcgtgggcttacagcagaatgcgctcaagtcatcgccgcacgcctcgctgggaggctttcccgtggagaagtacatggacgtgtcaggcctggcgagcagcagcgtaccggccaacgaggtgccagcgcgagccaaggaggtatccttctaccagggctatacgagcccttaccagcacgtgcccggctatatcgacatggtgtccactttcggctccggggagcctcggcacgaggcctacatctccatggaggggtaccagtcctggacgctggctaacgggtggaacagccaggtgtactgcaccaaggaccagccacaggggtcccacttttggaaatcttcctttccaggtaggggcgatggagaaaagggaccgacacgagggagggggagagagaaggagaaaagaaaggactaagagtatgcgcccctacttgggagtgggagttgtgcctgtgctccacacgtgaccagggttaacccagtggaaatttgtccagttcgtgtgaaatctgtaaattcctcctctgatttcaactgcctccgtcactgccctttctttcctgtgtgcagcgcagacacgtttttctcctaaagttgagagtctctgcgtgccctttccttgggcctctcccttttctcctaaagagaactttttcctaagaaacctgacagagttgggtccccccattttcaaagacatcactgccccaagatgactactaaagcttgttagatcaagctcacgaactcctaacataggaacgcgggaaatcaaaatttgagcaaaagacctgagttggtatgtgtctatgtatgtaagtttgtttttatacaaccgacatttgcagaaactgtcctcatgaacgtgcccaataaccacaccataaaattgcaagcttgttaagatgccggtttgagaaactatgataatcaatcaaattaaccattgttgttaagtgcaaataatccttctttaataacaggtaagtgttatgtctatgtacataataaagaccaaacagcatggcattttttaaaaatttcctgcacccctgcaaacgcacacacacacacacacacacacacacacacacacaatcctcagctaggtgctccgaatatcccagcctaatttttcttgtgcttttgtttgtatcaggggatgtggctctaaatcagccggacatgtgcgtctaccgaagagggaggaagaagagagtgccttacaccaaactgcagcttaaagaactggagaacgagtatgccattaacaaattcattaacaaggacaagcggcggcgtatctcggctgctacgaacctatctgagagacaagtgaccatttggtttcagaaccgaagagtgaaggacaagaaaattgtctccaagctcaaagatactgtctcctgatgtggtccaggttggccacagacagctt

SEQ ID NO: 945 - DNA, 1378 bp, Homo sapiens
accgggctgggtagagtgatgcggaccctcctgctggtgctgtggctggcgacgcgcggaagcgcgctctactttcacatcggagagacggagaagaagtgctttattgaggagatcccggacgagaccatggtcataggaaactaccggacgcagctgtatgacaagcagcgggaggagtaccagccggccaccccggggcttggcatgtttgtggaggtgaaggacccagaggacaaggtcatcctggcccggcagtgtggctccgagggcaggttcactttcacttcccatacccctggtgagcaccagatctgtcttcactccaattccaccaagttctccctctttgctggaggcatgctgagagttcacctggacatccaggtaggtgaacatgccaatgactatgcagaaattgctgctaaagacaagttgagtgagttgcagctacgagtgcgacagctggtggaacaagtggagcagatccagaaagagcagaactaccagcggtggcgagaggagcgcttccggcagaccagtgagagcaccaaccagcgggtgctgtggtggtccattctgcagaccctcatcctcgtggccatcggtgtctggcagatgcggcacctcaagagcttctttgaagccaagaagcttgtgtagctgtcccaggtgtcacaacccatcctcccaggctgggggagaaaggacctcctggaactgacttcttctgtcaggaggactggtttccagccatacctgttctggaagggagaggggctggaggcacccacaggcacaagctgaaggcagcagcttggctaatactgagcaggtagtggggcaaattcctgccctctctctctggcctctgggccgtttggtagtaatcacccaggggctggtaaagcccctcctcttggcacctcagaatcacagtgttactgatcagggatgtgaggctgctgttgggggtggggggaggggaatgggcaggcaagccagtcttctgtcttcctttgctaacttagggttttgagcaggttggggtatggtgcctgtcatacccacctgccaccctgggaacctcactgttctctctttcagcctagacctgctgatccagggtgtgtgtgagttgagggtgggtggaggggtttgcagtgtgggaatgtggccctgcagttgacctgagctgcttcacatggttgtccattctggggcttaaagaactgggaccagaccaagtagaggccttggtgctggttggggtggggcctgcagagtcttagttactgatttcattttcaataaatgtaggtttgttacatgagtttcccaataaaaaaaaaaatgaaaaaaaaaaaaaaaaaaaaaa

SEQ ID NO: 946 - DNA, 2017 bp, Homo sapiens
atgaccaaagctgatctcataaataatttgggaaccattgccaagtctggtactaaagcattcatggaggctcttcaggctggtgcagacatctccatgattgggcagtttggtgttggcttttattctgcctacttggtggcagagaaagtggttgtgatcacaaagcacaacgatgatgaacagtatgcttgggagtcttctgctggaggttccttcactgtgcgtgctgaccatggtgagcccattggcaggggtaccaaagtgatcctccatcttaaagaagatcagacagagtacctagaagagaggcgggtcaaagaagtagtgaagaagcattctcagttcataggctatcccatcaccctttatttggagaaggaacgagagaaggaaattagtgatgatgaggcagaggaagagaaaggtgagaaagaagaggaagataaagatgatgaagaaaagcccaagatcgaagatgtgggttcagatgaggaggatgacagcggtaaggataagaagaagaaaactaagaagatcaaagagaaatacattgatcaggaagaactaaacaagaccaagcctatttggaccagaaaccctgatgacatcacccaagaggagtatggagaattctacaagagcctcactaatgactgggaagaccacttggcagtcaagcacttttctgtagaaggtcagttggaattcagggcattgctatttattcctcgtcgggctccctttgacctttttgagaacaagaagaaaaagaacaacatcaaactctatgtccgccgtgtgttcatcatggacagctgtgatgagttgataccagagtatctcaattttatccgtggtgtggttgactctgaggatctgcccctgaacatctcccgagaaatgctccagcagagcaaaatcttgaaagtcattcgcaaaaacattgttaagaagtgccttgagctcttctctgagctggcagaagacaaggagaattacaagaaattctatgaggcattctctaaaaatctcaagcttggaatccacgaagactccactaaccgccgccgcctgtctgagctgctgcgctatcatacctcccagtctggagatgagatgacatctctgtcagagtatgtttctcgcatgaaggagacacagaagtccatctattacatcactggtgagagcaaagagcaggtggccaactcagcttttgtggagcgagtgcggaaacggggcttcgaggtggtatatatgaccgagcccattgacgagtactgtgtgcagcagctcaaggaatttgatgggaagagcctggtctcagttaccaaggagggtctggagctgcctgaggatgaggaggagaagaagaagatggaagagagcaaggcaaagtttgagaacctctgcaagctcatgaaagaaatcttagataagaaggttgagaaggtgacaatctccaatagacttgtgtcttcaccttgctgcattgtgaccagcacctacggctggacagccaatatggagcggatcatgaaagcccaggcacttcgggacaactccaccatgggctatatgatggccaaaaagcacctggagatcaaccctgaccaccccattgtggagacgctgcggcagaaggctgaggccgacaagaatgataaggcagttaaggacctggtggtgctgctgtttgaaaccgccctgctatcttctggcttttcccttgaggatccccagacccactccaaccgcatctatcgcatgatcaagctaggtctaggtattgatgaagatgaagtggcagcagaggaacccaatgctgcagttcctgatgagatcccccctctcgagggcgatgaggatgcgtctcgcatggaagaagtcgattaggttaggagttcatagttggaaaacttgtgcccttgtatagtgtccccatgggctcccactgcagcctcgagtgcccctgtcccacctggctccccctgctggtgtctagtgttttttt

SEQ ID NO: 947 - DNA, 1349 bp, Homo sapiens
aactacaacgtccggctttctgagttgggtggcgggaaaggcgatgagtaaaggccgggcagaagctgcggcgggagccgccgggatcctcctgaggtacctgcaggaacagaaccggccctacagctcccaggatgtgttcgggaacctacagcgggaacacggactgggcaaggcggtggtggtgaagacgctggagcagctggcgcaacaaggcaagatcaaagagaagatgtacggcaagcagaagatctattttgcggatcaggaccagtttgacatggtgagtgatgctgaccttcaagtcctagatggcaaaatcgtggccctcactgctaaggtgcagagcttgcagcagagctgccgctacatggaggctgagctcaaggaattatctagtgccctgaccacaccagagatgcagaaagaaatccaggagttaaagaaggaatgcgctggctacagagagagattgaagaacattaaagcagctaccaatcatgtgactccagaagagaaagagcaggtgtacagagagaggcagaagtactgtaaggagtggaggaagaggaagaggatggctacagagctgtctgatgcaatacttgaaggataccccaagagcaagaagcagttctttgaggaagttgggatagagacggatgaagattacaacgtcacactcccagacccctgaggggcccacggtcaggactggtggggactgcaggatgtcagaagagtgagatgtcttgcactggctaccttgtttttggttggcttttgttgttgttcctcttacttttcactttagcagagcagtcaggagacaagcataaaccagagcactgggtagagaggatgagggctggtggctgggggtagaccccacgcatttcattgtctaaattgcagtagcttgaggttaacatttagacttggaacaatgctaaaggaaagcatttggcaatatttattataatttaattttatataaaaatatttaatttcctctggatagtcaaacctgccagatatcaaacctgaggaaggcagaagtgaatttggagaactagggtagagagaggttgctataaaacgagcatttggagggcccacggcttcactcaggacctgctgggcttgtgtaccccaggagcccttttaagtatcttttgtacgcttttcaccccacccccaagtcctgggagaaatgcaggcaacactgagacatgggagaggccaagatatgcttgacagaaagggtgattttgaggctcagttaatatttcaaaattgtaaccgtagcaaaactgcattggtatttagaaaaataaaaaatttccaat

SEQ ID NO: 948 - DNA, 1472 bp, Homo sapiens
cgccatgttgaagccatcattaccattcacatccctcttattcctgcagctgcccctgctgggagtggggctgaacacgacaattctgacgcccaatgggaatgaagacaccacagctgatttcttcctgaccactatgcccactgactccctcagtgtttccactctgcccctcccagaggttcagtgttttgtgttcaatgtcgagtacatgaattgcacttggaacagcagctctgagccccagcctaccaacctcactctgcattattggtacaagaactcggataatgataaagtccagaagtgcagccactatctattctctgaagaaatcacttctggctgtcagttgcaaaaaaaggagatccacctctaccaaacatttgttgttcagctccaggacccacgggaacccaggagacaggccacacagatgctaaaactgcagaatctggtgatcccctgggctccagagaacctaacacttcacaaactgagtgaatcccagctagaactgaactggaacaacagattcttgaaccactgtttggagcacttggtgcagtaccggactgactgggaccacagctggactgaacaatcagtggattatagacataagttctccttgcctagtgtggatgggcagaaacgctacacgtttcgtgttcggagccgctttaacccactctgtggaagtgctcagcattggagtgaatggagccacccaatccactgggggagcaatacttcaaaagagaatcctttcctgtttgcattggaagccgtggttatctctgttggctccatgggattgattatcagccttctctgtgtgtatttctggctggaacggacgatgccccgaattcccaccctgaagaacctagaggatcttgttactgaataccacgggaacttttcggcctggagtggtgtgtctaagggactggctgagagtctgcagccagactacagtgaacgactctgcctcgtcagtgagattcccccaaaaggaggggcccttggggaggggcctggggcctccccatgcaaccagcatagcccctactgggcccccccatgttacaccctaaagcctgaaacctgaaccccaatcctctgacagaagaaccccagggtcctgtagccctaagtggtactaactttccttcattcaacccacctgcgtctcatactcacctcaccccactgtggctgatttggaattttgtgcccccatgtaagcaccccttcatttggcattccccacttgagaattacccttttgccccgaacatgtttttcttctccctcagtctggcccttccttttcgcaggattcttcctccctccctctttccctcccttcctctttccatctaccctccgattgttcctgaaccgatgagaaataaagtttctgttgataatcatcaaaaaaaaaaaaaaaaaaaaaaaaaaaaaaa

SEQ ID NO: 949 - DNA, 1078 bp, Homo sapiens
tccaagctgagctgagggcccgcggcggccgcggccggtgcatgtgcggctgctggatgcggaggcggcggcgacggcgcggatcggcaggatgttagggcagcagcagcagcaactgtactcgtcggccgcgctcctgaccggggagcggagccggctgctcacctgctacgtgcaggactaccttgagtgcgtggagtcgctgccccacgacatgcagaggaacgtgtctgtgctgcgagagctggacaacaaatatcaagaaacgttaaaggaaattgatgatgtctacgaaaaatataagaaagaagatgatttaaaccagaagaaacgtctacagcagcttctccagagagcactaattaatagtcaagaattgggagatgaaaaaatacagattgttacacaaatgctcgaattggtggaaaatcgggcaagacaaatggagttacactcacagtgtttccaagatcctgctgaaagtgaacgagcctcagataaagcaaagatggattccagccaaccagaaagatcttcaagaagaccccgcaggcagcggaccagtgaaagccgtgatttatgtcacatggcaaatgggattgaagactgtgatgatcagccacctaaagaaaagaaatccaagtcagcaaagaaaaagaaacgctccaaggccaagcaggaaagggaagcttcacctgttgagtttgcaatagatcctaatgaacctacatactgcttatgcaaccaagtgtcttatggggagatgataggatgtgacaatgaacagtgtccaattgaatggtttcacttttcatgtgtttcacttacctataaaccaaaggggaaatggtattgcccaaagtgcaggggagataatgagaaaacaatggacaaaagtactgaaaagacaaaaaaggatagaagatcgaggtagtaaaggccatccacattttaaagggttatttgactattatataatccgtttgctttcagaaaatgttttagggtaaatgcataagactatgcaataattattaatcattagtattaatggtgtattaaaagttgttgtactttg

SEQ ID NO: 950 - DNA, 2941 bp, Homo sapiens
gggttactattgcctttctgcgcttgatcaccacccttgtcaaggggcaacttggtagtacccagagccaaggacttgtaccctgtgtaatgtttgtgctgaaggagatgcttcccagctaccataagtggcgctacaactctcatggagtgagggaacagattggttgcctgatcttggagctgattcatgcgatactgaacctgtgccacgagacagacctgcacagcagtcatactcccagcctgcagtttctctgcatctgcagcctggcatacacagaagcaggacagacagttatcaatatcatgggcattggcgtggacaccattgacatggtgatggctgctcagcctcgaagtgatggggcagagggccaggggcagggccagctgctgatcaagacagtgaaactggcattctccgtcaccaacaatgttattcggctgaaacctccttctaatgtggtgtcccccctggaacaggctctctcacaacatggtgctcatggaaacaacctcattgctgttctagccaaatacatctaccacaaacatgaccctgctttgccacgtcttgccattcagctgctgaaacgtctggccacggtggccccaatgtcagtgtatgcttgtctgggcaatgatgcggctgccattcgtgatgccttcctgacccgattgcagagcaaaattgaggacatgcgcatcaaagtcatgattctagagttcctcactgttgcagtagagacccagccaggcctcatcgaactgtttctgaacctggaagttaaggatggcagtgatggctcaaaggaattcagccttgggatgtggagctgtctccatgcagtgctggagctgattgattcccaacagcaagatcgatactggtgcccacccctgctgcatcgtgccgccattgcctttttgcatgctctgtggcaggatcggagggacagtgccatgctggtcctccgaaccaaacccaagttttgggaaaatttaaccagtccgctgtttggaaccctttctcctccctctgaaacatcagagcccagcatcctggaaacctgtgccctaatcatgaagataatttgcttggagatatactatgtagtaaagggttcattagaccagtcattaaaggatacactgaagaaattttccatcgagaaacgctttgcctactggtcagggtatgtcaagtcattggcagttcacgtggccgaaacagaaggcagcagctgcacctccttgttagagtaccagatgctggtgtccgcctggaggatgcttctcatcattgccaccactcatgcagatataatgcacctgactgactctgtggtgcgtcgccagctctttcttgacgtgcttgatggaaccaaagcattactcctagttccagcctcagtgaactgccttcgccttggctccatgaagtgcactctgctgcttatcctcctccggcagtggaagagagagttaggttctgtggatgaaatccttggacccttgacggagatcctggagggagtgctgcaggccgaccagcaactcatggagaagaccaaggccaaggtgttctcagcattcatcacagtgttgcaaatgaaggagatgaaagtaagtgacatcccccagtactcccagctggtgctgaatgtctgtgagaccctccaagaggaagtgattgcactcttcgaccagacccgccacagtctggcattaggcagtgccacagaggacaaggacagcatggagactgacgactgttctcggtcccggcacagggaccagcgtgatggggtgtgtgtcctgggcctgcacctggccaaggagctgtgtgaggtagacgaggatggtgactcctggctgcaggtaacccgcaggctccccatcctacccaccctcctcaccactctagaggtgagccttcgcatgaagcagaacctgcatttcactgaggccacattgcatctgctcctcaccctggctcgcactcagcagggagccacagcagtggctggagctggcatcacccagagcatttgtttgccccttctgagtgtgtaccagctgagcaccaacggcacagcacagacacctagtgcctctcggaagtccctggatgccccctcttggccaggagtctaccgcctgtccatgtccctgatggagcagctgctcaaaactctgcgctacaacttcctgcctgaggccctggacttcgtgggtgtccaccaggagcggaccttacagtgcctcaacgcagtgaggacagtgcagagtctggcctgcctggaggaggcggaccacaccgtgggttttattctgcagctctctaacttcatgaaggagtggcacttccacctgcctcagctcatgcgtgatatccaggtgggggcccaagatggtgtcttggagtctggggtaatgcttggagacagggaggctgtgaggtctcactggggcactcctagtgaattgcaggatgttcctgaacgggggcttttcccttggggagcacagggtttgctgtcatgtgcttactctggctaaatgtttccttccatagtcaagggcagccatgtaggttaagaatttggacttttatcagttagatcttggttcagatcccttaagaatacacttggggccgggcatggtggctcacgcctgtaatcctagcactttgggaggcagtcaggagttcgagatcagcctggccaacatggtgaaaccctgtctctactaaaaatacaaaaattagctgggcgtggtggcacgtgactgtaatcccagctactcgggaggctgagttgggagaatcgcttgaacctgggaggcggaggttgcagtgagctaggatcgaaccattacactccagcctgggtgacagagcgagactccgtcccaaaaagaaaaaaaaaaaaaaa

SEQ ID NO: 951 - DNA, 2974 bp, Homo sapiens
ggcttggaaaagtcaagtgacttgctaataagtgacagagccactcgaatcccaggctgtctgctgtctcgttcccctccatctgatccccacacaggctcacgtactgaagcatctgtgctctgtgccctatcttagcacctactatgtaattcaagagcaaaggggggccccaaggtgaaaataaggcactgaaaggctgtggtctggaagagcccaggtccagcacccctttttcagtatgagccccagttcagccggcctcagcctcttgctgtgatggagatccacaagcctagccaagcttggggagtcactgcaaaaggactgagcccaggagagcggggacagtcatgtgcctctggtaggatgggcacagttactggtaaggtcacagagatctagtgggaggtaccataggtagatacctccaaagattctagatggcacggtggtcaagctagacaaaaagtcagagctggaagggccgtctcattgaaggcaggcaagcaagagaggacaagggatgtagccgcctgacagtgagctacagcactggccccaggatgcaaacccctctctcctcctcatgccactgcctctccccaagtgcaacacctatggccaggatcaggggtacagatggctcgttaccagccaacccttttgaattcttctacttctacctgaccccctctcctcactggcctggggtcaagaagtttgagtctgggagctggattgcctgcaaatagtgaaagcctgaaacataatggtttgccatgttttgaaaaaaaatgcatatttaatttcttcctcatgagataggacagttgctgttctttcttacctggcaatgaccctaaaatgtatatcctctttcctgaatatttagcagagacacacacacctgtccagagcgtttttggtatgcaaagtactttgacattggttgccaaagtcctccattttatagatgaaaaaactaaggctcaggaggcttgagacttgctaaaaggtcacacagcttggaagtgattcttcaaatcctctgctctttctgctgccacctgctgggtctcttggcaagcatggagggaggggctaactgtactttatagagctgggaagcccagtctctgagctgagcagatttgtatgaactgctttgggccaggacctgtaatgagccctggggagggacccagaggcacatctaactggcagcacaaggaggatgagaatttgcaactaaaggcctcacttggacaaaacactttggggtcacaatgcccaggaccgaagacatgttcaaggacagcacgaggcatctttctattgggagacccatgtccttggtaagcctgcacacctggcttcctaatccctgagagcctgcccactgtccagatccagtgagttggtacaaaacgtacagactgaagtccctgggcttgcttttcccatgggtgaggaccagaaccagactctgagcatccttacccctggccacccgaattgttccaagtttgaggtaccccgttcccagagatctgggggtccttctttggagggcttgctttgttctgatggccttcagaaaggaatcacatgaagtataaaaggacaggccccttggtcaccaagttttggctcctcatacagataggactcatccaggttcccagcgaggcactgactaagcgaggctcagagcttccatatcaaattcctcagctttgttctgtgcccagagggggtgggccccattctgggccctgtgaactttgtcttatatatcaccatctgtatcagaattcctcctcaattgcagttaagtgaaaatacgtggaagtctgcttttccatcctgtattctcccacatcactactggctgtgcggcccccgctgcttgccaagcttgggaatccagagaggggcagtagtagagtgggccagttgggacccacccgcagagctgaagaaacacgccagactaactgatgggattccacaccggagcctctgagcgcacaggcaggcatgccaagggggctgcagggtttgtcctttacttatctgcccctttcctagaaaactcctcgtttctgaaattaggcattatatggttccaggacccagccttcaaaattcctggcaggccagcttcaacattccatggccagccctgcctaagccagacttgggtcccagtccctcagtctctccagtggatatcttctgtggtgcatgctgttgagtccaacccaaaggccaaccgaggcacacaggagttgggactggctgccacaaagctagaaagggacaaaacagcacttgcttccctatggccacatggatagtccctggatatccttgctgtggtagaggtcctctacccattccagccactgatagcagggggattttccttcctaaggagaacagatgtaacagctttgcaaagtaccggcccataggaatcaaatgggtgagatcagctttgggcctgaccccagcaagaccagcatctccagaccccagcctttctcctcaggcctaagagagtcagggaaagagaggagactgtcccagagaccttctcctcgggtcagccagatagtctggatctatggtgtgactcaagctcctccttacccagggggggtaaggccaggcctctagctacttggagttgtctgtaataatcttgaaaggcccaagggcctgtccccatcctgacttaaaggcatctgcttccctgtttcatatcacatgacagagaaacctgttctcatggcatgtaacatccctgtgaagagagcgttgtatatgattttgtattttttaattcattttaatctacaggttggaatctaatttttaaattttattggaactcacattttaaaaagaaataaaatttaaaataataataataataataataataataataaaaaaaaaaaaaaaa

SEQ ID NO: 952 - DNA, 5737 bp, Homo sapiens
gtcagatcagggatcattttttttccttcctctactccctcccccctacccgcccctccctccctgtttcccttccctccctccctcccctctctgctgggtctgtgcgctggggcgcccgatcccctccgcagctgggacgctccgaactcgaggcaggagtcggctctccggagcctcgtccctcccttccccttccctgcccccttcccccacccccgactcgggcttggcgcggcggccagaggaaccccgagtcccggcccaggcccctgagctggagggatggaaaactcctctgcagcatcagcctcctcggaggcagggagcagccgctcccaggagatcgaggagctggagcgcttcatcgacagctacgtgctggagtaccaggtgcaggggctgctggctgacaagacggagggtgatggcgagagcgagaggacccagtcccacatctcccagtggacagcggactgcagcgaaccgctggacagcagctgttccttctcccgagggcgagcccccccacagcagaatggcagcaaagacaactctctggacatgctgggcacggacatctgggcggccaacaccttcgattccttcagtggtgccacctgggacctgcagccggaaaagctggacttcacccagttccaccgcaaagtccgacacacgcccaagcagcccctgccacacatcgaccgcgaagggtgtggcaaagggaagctggaagatggggatggcatcaacctgaatgacatcgagaaggtccttccagcctggcagggctaccacccgatgccccatgaagtggagatcgcacacaccaagaagctgttccgcaggaggagaaatgatcgaaggcggcagcagagacctccggggggcaacaagccccaacagcatggtgaccaccagccaggcagtgccaaacacaacagggaccaccagaaatcctaccaggggggctcagcaccccacccctcagggaggcccactcaccatggctacagccagaaccggcgctggcaccatggcaacatgaagcacccaccaggcgacaagggggaggcaggcgcacaccgcaatgccaaagagaccatgaccatcgagaacccaaaactggaggacactgcaggggacaccgggcacagcagcctcgaggccccccgcagccctgacaccctggccccggtggcttctgagcggctgcccccacagcagtcaggggggccagaggttgagacaaaacgtaaagacagtattcttcccgagcgcatcggggagcggcccaaaattaccctgctccagtcttccaaagacagactgcggcgaaggctaaaggaaaaggatgaagtggccgtggagacgaccactccccagcagaacaagatggacaagctgatcgagatcctgaacagcatgcggaacaacagcagcgacgtggacaccaagctcaccaccttcatggaggaggcccagaactccaccaactccgaggagatgctgggcgagatcgtgcgcacaatctaccagaaggctgtgtccgaccgcagcttcgccttcaccgctgccaagctctgcgacaagatggcgctctttatggtggaggggaccaagttccggagcctgctcctcaacatgctgcagaaggacttcacggtgcgcgaggagctgcagcagcaggacgtggagcgctggctgggcttcatcaccttcctgtgtgaggtcttcggcaccatgcgcagcagcacaggcgagcccttccgtgtgctcgtgtgccccatctacacctgcctcagggagctcttgcaatctcaggatgtgaaggaagatgctgtcctttgctgctctatggagctgcagagtacaggccggctgctggaggaacagctgcctgagatgatgacagagctcctggccagcgcacgggacaagatgctgtgcccctcggagtccatgctgacccggtcgctgctcctagaggtcatcgagctccacgctaacagctggaaccctctgacgccccccatcacgcagtactacaacagaaccatccagaaactgacagcctgacagccagggggcctggcaggcggcccacgggcagctggggccctggtgcacagggccagatggacaggcgggaggacaggggtggccctggcgggagaaagaaatggggaggagggcaggcagagtcggtggccagtctggagccagacggggaagggagcaaatccctgagaggagtgcccccgcacaagccccccagcccgagcatgcaagctcacaccaataagggaagcatgtttctttttcctggtggccctggccctccccttcctcactcccgcctctcccctccccatcagacccatcccccacggagctttgtgtgagggatctcatcgctgtgactcctcggagaccttggcagcctcgcacgccggggcaccgcttgggtcagaaaggacctcggaaggctgaaaaagtgggtcggagacgggctcgcattgttcccgcatgctgtcagccgcagtcgccaactggcagcaggcgacgtgtagcagatgtccgggaggacaaaggcaggcacggtccccaccagccgcccgtaattgacggcctttgtcagccatggcagagctgacgctccacctcccacctccaagtcctcctcactgcagcccccacagcctcaggcctagggggtcaggcgcagcgggggagatggagtttgcagttccacttgcactcttttgtttattgtgttttatttttcaaaagtcggttgctttgaagtctctttggccaatgaaaatgcccgtgaggtgatcacacagtcagcactgttgaggacccccggattagtgggagatcaaacccagctcccctctagaagaaggattcgagccacagacagcttgccagtagccaattagggtaattggaaacttctgccccggcggggggtccccgctggaatcctgtgttcctcgccactggcttccagcgcctctgttttctcaaagggctgatactgtcaccactgggaccaagttaaacctggtcctggccccaggggccttgtggcaaacagggcacagaacgagactggcaaattaaaaccaaaattctagatggtgtcttgcgctccacacgcaggtcttactggggaaaaggatgggagtgggggctccccaggactcgattttagctaatgcgctgtgtcactgccccagctcggacgtagaagcccagccctccgtgagctcttgggaaaggggtgaattcactgggtcatggaagggacagtcaggtgaccagcggggtcgccagatgaagcttcccagccgggaaacaagacggggtttcttggcaggccctggtcctggggagcaggccctgttgttggctggagaggaaggtgtggggtggaacaggtgtccacatagctccatctctgggggctggagcacacactttgatgagcccccccggaaatgatgtcagagcctagccgcttccttatttgctcttttattgaggccgggcaggccctgggtcactttggaggcccctcttggtccacactggactggccgggaggtgatgggcggggaaggttctcgtgattgattgattctgagtctgagagtggcgagtggggagaggcttccccagttctctccagctttccctgcagctgcaacctgccctctggtcccaggtgtggagcctttgcctgtctctaaaaagagcctgttggcgacaaggtgtagggggcacaagtttacctgaaacaggtcagtggtctctcccaagaagcgcacgccacctctggtccctggccctgaaccctgccttcttcctccctccacggtttcttcccagactttctcaagctcctcctcactgcccttcctccccagcccagcctgggaacacagatgccccgcgggtaggaggcctcgagggaggagccgggctgatgcggggctgctcagggcaggccccagggcgagcttgccatcgtggccaggcagcctccacctgtgcttcagtggcccctgcccccctgaagcatgtggggtttgtccgctaggaggaggcaaggcccccgaagagaggagagacctgggagtgggagctcaggtcagggaggaggcaggggagtggggtctcccagacccaacggtgagctcagagcaagcttcacgcaggacgctccgaaacactgtgtggagggggctgtgttgtgggcaccttggggcctgattctccttcctccgaacgggctccttgatggcctggccacaggggcagctccccattggctgttaggaccagagtgtgaagaagaagtgaaatataaatatgtatacatatataaatatatttttaattacatgtcgtgtcacggtggctccagacatactgtttgcctagtttattccactgcttgaaagcgcttcctagccaatctgaacaacaacactttaagctgtttttctaaatgcaggttgctgctcctttttcagatatggaaggaaaacgttaagactattttttttttaaagaaacaacagtcaagcctaaaatttgagaccccgaggcagcttcccgagggagactgctcagacaggaactgcaggacagaagtggatgccccacagaccctggccccctccccaagtccatcccctctctgtggcatgaggaaggccgcgtccgagttgacctctgaatgtatgtgatgagaggcagagctggatattgcatttctaaggcttgcattgctttcccctcgcccgcggttcttggcgcatggaagaggcggtccagccatctgatgttgatcctgtctcagtctccccactgcctgtcaggatgagttagtcattgtttttctccgaggcggcctgcttgccacagccctgctccccaaggcctggtggctttgccgaagctctgggaccgcagccccagcgaggcccccaacctcacccagacgaggccaggagccccgccaccctccacgggatgtgcaccctcagaccccattctctctgttcgtccttccttgaccagtctgtaaaccttcactgtttggggatcgtcctgtccatccatgtaaatgtaaatgttggccgagtcggtatttattctgattgatttttattttattctattattttctccgagggatgagggtggggggtgtgggaagggtaccacagatcaggccggggcagctgtaggggcgggggcccagacagccaggccgccaccagagcagccccatggggtgccccagacgcgggcctccaagaagccaagtcccagtctgttttctggcatcagacaccggcccgtgttccttgtcagacagacagactctcaggcctgcctggggagtcgtgtccctcagctgcagggcactgtgttgggaaaccattggctgggcctttgaggacacagatcagaagaaagaaagacaactttcctctgcgcggaacactcacacggaagggctggccgcctccctgagccggctgggagtggacgacaggacctacctccccagagcaagggcctggggcttcccgccaaagctgccgcggaaccccgctagtgcgaccaccctccctccgtcggtatgtcctgctttccagctgaacccaaactacaagtgggtttaaaaaaaataaacaccaccaccaaaaac

SEQ ID NO: 953 - DNA, 5319 bp, Homo sapiens
aagctgggaaccagcgccttcagtgaggtggtcactgtgaacactttagcattccctattacaactccagaacccctggtgctggtcaccccaccgaggtgcctcatagccaatcggactcagcagggtgtgctcctgtcctggcttccgcctgccaaccacagctttcccatcgaccgctacatcatggagttccgtgtcgcagagcgctgggagttgctcgacgatggcatccccggcaccgaaggagagttctttgccaaggatctgtcacaggacacgtggtatgagttccgggttctggccgtcatgcaggatctgatcagcgagcccagcaacatcgccggcgtctccagcacagacatcttcccgcagccggacctgaccgaggatgggctggcgcggcctgtgctggcgggaatcgtagctaccatctgcttcttggcagctgccatcctgttcagcaccctggctgcctgctttgtcaacaagcagcgcaagcgtaagctcaagcgcaaaaaagaccctccactctccatcacccactgcaggaagagcctggagtctcccttgtcctctggcaaggtgagccccgagagcatccgcacgctccgagcgccgtcagaatcctccgacgaccagggccagcccgcggccaagaggatgctgagccccacccgtgagaaggagctgtcgctgtacaagaagaccaagcgggccatcagcagcaagaagtacagcgtggccaaggcagaggccgaggcagaggccaccacgcccatcgagctcatcagcagaggccctgacggccgcttcgtgatggaccctgccgagatggagccctcgctgaagagcaggcgcatcgagggcttccccttcgccgaggagacggacatgtaccccgagttccgccagtcggacgaggagaacgaggacccactggtgcccacatctgtggccgccctgaagtcccagctcacccctctgtcatccagccaggagtcctacctgccaccaccagcatacagccctcggttccagccccgcgggctggagggccccggtggcctggaaggtcggcttcaggccacaggccaggcccggccccctgccccccggcccttccaccatggccagtattatgggtacctcagcagcagcagccctggggaggtggagccgcccccgttctacgtgccagaagtgggcagccccctgagctccgtcatgtcgtccccgcccctgcccaccgaggggccctttggccaccccaccatccccgaggagaatggagagaatgcatccaacagcacgctgcccttgactcagacacctacaggagggcgctcccctgagccctggggccggccagaattccccttcggggggctggagaccccagcgatgatgttcccccaccagctgccaccctgtgatgtgcccgagagtctgcagcccaaggccggcctcccccgaggactgccccccacctccctgcaggtgcccgcggcctacccgggcatcctgtctctggaggcaccgaagggttgggcaggcaagtcgcccggcaggggccctgtcccagcgccccccgccgccaagtggcaggacagacctatgcaacctctggtaagccaagggcagctgcgacatacaagccaaggcatgggcatacctgtgctgccttaccccgagccggctgagccgggggcgcacggcggccccagcacatttggcctggacacccggtggtatgagccccagccccggccccggcctagccctcggcaggccaggcgcgccgagcccagtttacatcaagtggtgctacagccctcccggctctcacctctgacccaaagccccctcagctcccgcaccggctcccctgagctcgccgcccgtgcccggcctcgcccgggcctcctgcagcaggcagagatgtcagagatcaccctgcagccgccggctgcagtcagcttttctcgaaagtctacgccgtccacaggctccccctcccagagcagccgcagtgggagtcccagctaccggcccgccatgggcttcaccactctggccaccggctacccttcccctccacccggccccgcccctgctgggcctggggacagcttggacgtgtttggacagacgccttcccctcgaaggacgggggaggaattgctccgaccggagaccccaccacccacgttacctacttcagggaagctgcggagagacagaccagctcccgcgaccagcccgcctgagagagcactctctaaactgtagcagctggtattccagctatctgggcagtgttgtcgagacaagcctctcctcagctcaataggtaagggagctcctcggctgggcgggcgggggcgggcaggcggacggggcttcggccgggccattgcttcctggacaggggatccaaaccatgtcccctcaccgccccgtggggtggccgctgccgctcctcgatccccacggcttctgggttccccacatcgagccacgctcggcaccgcctagctgcagcttctgccccccaccccccgtccccatgtccggcccctctagagccccctgcggctctcctcactcctcgccagcctcgccagcctgctgccagtacacccagggcctcccacagaagccctggggccctgcatgcaccccgaaggggcccagaacacccgagatctgctttgcatctctgcacccttggggacctctctggggcccctctggtatccaggaagagcccccccgcaccctattctcccagcagccccaggcataacatcccttctcctggggtggctggcccctcaccagcttcttgagatcttcgtggtattaggctctctcgaggagtacaaggttgggatgagccccacttcttccttgacagtggggtcctctgcagggtcaggtccctgcagtcctatggggctttgtagcgaaatgtcatcactcccctgtgctccttgccttctgcagcctgaccttggtagtcacaggactgaaatgtgacctagcccttgggtccacattgctttcaaggtccctgttgtagccttgtcgtcctccctgggtcatgctgtagggaaagggtcttaggaggacctccccgaggggagggggcaggcttcccctgggcagacaggcattgagctggcaggaagtgaaacccccagggaccagcactgtgtccctccccctgcccccgcagtcagcctctccttgagtgtccttccaggtggaagctaaaggaacttgggcattcagggagcctctgagtccctcacagagactcagggccacccgaagctcgctccctctcacagtagcctgacaaggtgctgccgctcgccacggaccctctgccctgtgcctgggcacacacaggcatcgggcacctgcatgggagacggcgagcctcccgtccaggtgcttctggctttccaggcgagaaggagacaggtgccttccccccctagagatgtcaagggaggttcactttcctaaccagggctataaatctcattcattcctaagagtggcctccataaagaggactgccctgacatttctttaccatctgtagctataaaattgtcagcagcccagaggccctggaattgtgggtgaggctgtctggcatagggtgactgtgagggctgtcaggcagcgtttatgagctcacctgctctggggccctcctgcgcccagagacccactggtcttccaccttccccagctccctccctgtcccagctgtgactcctccacagcccccggaggtgtgggagccctagactagctctcaccccagctcctggaaattcctagactctgctctcatgtgttattcctcaccccttcactcaactccattgaccctcccctttcccagtgtccccactgtgccagatccaagagaagcccgctctcctttcactgctgtggcaaacccagaaaccaggggcagcgatgagggaccatcgtttctctcccgggcctggccagcatccccagcctaggagaaggagaccctccccatcctgagtcagcccctcggtgctggcctctcctgcctgctgggagcctccccggtacggctgctgggtcctggggagatgcaggctctgttcagatgctgtctccatgctgcacctttgcatgtgtgccctcttggtcttgcttggagaagttgtgacagctcttgtccacgtgcgttctcactgtttcttttcccttcagttcctctcctgttcctttggtccatatgtagttgttgcccctgcctctcctcctttctctctccctttttttctcctcttcccaactcccttctcaacatggggagttgtattgcgtggacctgtcctttctgtggactgtggggaggccgagccaattcttagctcctgtctgagcctagtgatgccctgtcctcacctctgcttccactccctttcccattcaggctgactgtcaccgcagggaggcaggtgggtctggagcatggagtggcccctgtcctgggtcagctgtaggaaggggcccctttgtaaacaagcttctgccaggttctgaggcagagcactggtctgagtccggccccacagaagggttccatcttgtggtcagcggggtgggctcagacctgcagactcccgcagtgggcccaccctttcccttgctatggcccgtctatgagtggctttcccctgcctccatcggtgtataatcaggcaggtggtgtttgctcttaggtgattagaagaggaggaaaatgcccatcaagccactgcttcagcctgttggccagggaacacctgaacagggtcaaaatggtcagctcctgggcgctgagctaaggaaatatgcagggggttttgactttccctgtcctgaggcttgcctccactttgacctggctgcatctttcctcagctcttctgggtaagctgagagctaagcaaataagacctcctgggctacctggtcatgatttgggttttgtatggattttttgaaaagagagaaaaagagtgtgggctgggtgccgtggcccagagggcagatctcttgagtccaggagttcaaggccagcctgggcaacatagtgaagccccatctctgcaaaaaaatacaaaaaaatagctgggcatggtggcacatgcctatagtcccagctccttggggggctgaggtgggaagatcatctgagctggggaggtcgaggcagcagtgagccgagattgcgccacttcactccagcctgggtgacagagatcctgtctc

SEQ ID NO: 954 - DNA, 1360 bp, Homo sapiens
aatggggccgcccggctccccatggcagtgggtgacgctgctgctggggctgctgctccctcctgccgcccccttctggctcctcaatgtgctcttccccccgcacaccacgcccaaggctgagctcagtaaccacacacggcccgtcatcctcgtgcccggctgcctggggaatcagctagaagccaagctggacaaaccagatgtggtgaactggatgtgctaccgcaagacagaggacttcttcaccatctggctggatctcaacatgttcctaccccttggggtagactgctggatcgataacaccagggttgtctacaaccggagctctgggctcgtgtccaacgcccctggtgtccagatccgcgtccctggctttggcaagacctactctgtggagtacctggacagcagcaagctggcagggtacctgcacacactggtgcagaacctggtcaacaatggctacgtgcgggacgagactgtgcgcgccgccccctatgactggcggctggagcccggccagcaggaggagtactaccgcaagctcgcagggctggtggaggagatgcacgctgcctatgggaagcctgtcttcctcattggccacagcctcggctgtctacacttgctctatttcctgctgcgccagccccaggcctggaaggaccgctttattgatggcttcatctctcttggggctccctggggtggctccatcaagcccatgctggtcttggcctcaggtgacaaccagggcatccccatcatgtccagcatcaagctgaaagaggagcagcgcataaccaccacctccccctggatgtttccctctcgcatggcgtggcctgaggaccacgtgttcatttccacacccagcttcaactacacaggccgtgacttccaacgcttctttgcagacctgcactttgaggaaggctggtacatgtggctgcagtcacgtgacctcctggcaggactcccagcacctggtgtggaagtatactgtctttacggcgtgggcctgcccacgccccgcacctacatctacgaccacggcttcccctacacggaccctgtgggtgtgctctatgaggatggtgatgacacggtggcgacccgcagcaccgagctctgtggcctgtggcagggccgccagccacagcctgtgcacctgctgcccctgcacgggatacagcatctcaacatggtcttcagcaacctgaccctggagcacatcaatgccatcctgctgggtgcctaccgccagggtccccctgcatccccgactgccagcccagagcccccgcctcctgaataaagaccttcctttgctaccgtaaaaaaaaaaaaaaaa

SEQ ID NO: 955 - DNA, 1240 bp, Homo sapiens
ccgaagagcccccgaacggcaacgcttgtccccccttccatcccggcaccatgctggatagggatgtgggcccaactcccatgtatccgcctacatacctggagccagggattgggaggcacacaccatatggcaaccaaactgactacagaatatttgagcttaacaaacggcttcagaactggacagaggagtgtgacaatctctggtgggatgcattcacgactgagttctttgaggatgatgccatgttgaccatcactttctgcctggaggatggaccaaagagatataccattggccggaccctgatcccacgctacttccgcagcatctttgaggggggtgctacggagctgtactatgttcttaagcaccccaaggaggcattccacagcaactttgtgtccctcgactgtgaccagggcagcatggtgacccagcatggcaagcccatgttcacccaggtgtgtgtggagggccggttgtacctggagttcatgtttgacgacatgatgcggataaagacgtggcacttcagcatccggcagcaccgagagctcatcccccgcagcatccttgccatgcatgcccaagacccccagatgttggatcagctctccaaaaacatcactcggtgtgggctgtccaattccactctcaactacctccgactctgtgtgatactcgagcccatgcaagagctcatgtcacgccacaagacctacagcctcagcccccgcgactgcctcaagacctgccttttccagaagtggcagcgcatggtagcaccccctgcggagcccacacgtcagcagcccagcaaacggcggaaacggaagatgtcagggggcagcaccatgagctctggtggtggcaacaccaacaacagcaacagcaagaagaagagcccagctagcaccttcgccctctccagccaggtacctgatgtgatggtggtgggggagcccaccctgatgggcggggagttcggggacgaggacgagaggctcatcacccggctggagaacacccagtttgacgcagccaacggcattgacgacgaggacagctttaacaactcccctgcactgggcgccaacagcccctggaacagcaagcctccgtccagccaagaaagcaaatcggagaaccccacgtcacaggcctcccagtaaaaggccctgctgtggccacccagtgctctgcctacctgccccacccctcacagccccaggga

SEQ ID NO: 956 - DNA, 1397 bp, Homo sapiens
gccgacccctgagttaggacaaaagcatgtcttcccttcctgggtgcattggtttggatgcagcaacagctacagtggagtctgaagagattgcagagctgcaacaggcagtggttgaggaactgggtatctctatggaggaacttcggcatttcatcgatgaggaactggagaagatggattgtgtacagcaacgcaagaagcagctagcagagttagagacatgggtaatacagaaagaatctgaggtggctcacgttgaccaactctttgatgatgcatccagggcagtgactaattgtgagtctttggtgaaggacttctactccaagctgggactacaataccgggacagtagctctgaggacgaatcttcccggcctacagaaataattgagattcctgatgaagatgatgatgtcctcagtattgattcaggtgatgctgggagcagaactccaaaagaccagaagctccgtgaagctatggctgccttaagaaagtcagctcaagatgttcagaagttcatggatgctgtcaacaagaagagcagttcccaggatctgcataaaggaaccttgagtcagatgtctggagaactaagcaaagatggtgacctgatagtcagcatgcgaattctgggcaagaagagaactaagacttggcacaaaggcacccttattgccatccagacagttgggccagggaagaaatacaaggtgaaatttgacaacaaaggaaagagtctactgtcggggaaccatattgcctatgattaccaccctcctgctgacaagctgtatgtgggcagtcgggtggtcgccaaatacaaagatgggaatcaggtctggctctatgctggcattgtagctgagacaccaaacgtcaaaaacaagctcaggtttctcattttctttgatgatggctatgcttcctatgtcacacagtcggaactgtatcccatttgccggccactgaaaaagacttgggaggacatagaagacatctcctgccgtgacttcatagaggagtatgtcactgcctaccccaaccgccccatggtactgctcaagagtggccagcttatcaagactgagtgggaaggcacgtggtggaagtcccgagttgaggaggtggatggcagcctagtcaggatcctcttcctggtactgttcttctctacaattttggaggcagaggttggtggggggggaacttaagaagcagtaatgaggatggttttatagctattccatagccttcctctttcttatcctcgtatgtgttctcactgtttttggtcaaattttactttgccctttttgttgttcctctgcaggtcattgttgaaaataaattatctgaattataatacgaaaaaaaaaaaaaaaaaaaaa

SEQ ID NO: 957 - DNA, 1349 bp, Homo sapiens
atcacctcttctgggctcaagatggacaacaagaagcgcctggcctacgccatcatccagttcctgcatgaccagctccggcacgggggcctctcgtccgatgctcaggagagcttggaagtcgccatccagtgcctggagactgcgtttggggtgacggtagaagacagtgaccttgcgctccctcagactctgccggagatatttgaagcggctgccacgggcaaggagatgccgcaggacctgaggagccccgcgcgaaccccgccttccgaggaggactcagcagaggcagagcgcctcaaaaccgaaggaaacgagcagatgaaagtggaaaactttgaagctgccgtgcatttctacggaaaagccatcgagctcaacccagccaacgccgtctatttctgcaacagagccgcagcctacagcaaactcggcaactacgcaggcgcggtgcaggactgtgagcgggccatctgcattgacccggcctacagcaaggcctacggcaggatgggcctggcgctctccagcctcaacaagcacgtggaggccgtggcttactacaagaaggctctggagctggaccccgacaacgagacatacaagtccaacctcaagatagcggagctgaagctgcgggaggcccccagccccacgggaggcgtgggcagcttcgacatcgccggcctgctgaacaaccctggcttcatgagcatggcttcgaacctaatgaacaatccccagattcagcagctcatgtccggcatgatttcgggtggcaacaaccccttgggaactcccggcaccagcccctcgcagaacgacctggccagcctcatccaggcgggccagcagtttgcccagcagatgcagcagcagaacccagagttgatagagcagctcaggagccagatccggagtcggacgcccagcgccagcaacgacgaccagcaggagtgacgctgcctgctcccggtgtgaccgcgtccttccctggccgacccgaaggaagccttctggttgtctgccacttcctcctgttggactgcctgagagaggggaagagagagacctcggacctgcatgtcaagatggattttccccttttatctctgccctcctccactccctttttgtaactcccttacagcccccagacccttcttgaaacgagagccagcaagctgagcacagaccagcagcgacctcccttccagcccccagaaagctcggtcacttgagtgttttctagaatcctggggtgctcccgggccgctctcagagaagtggcaggtttcacgttcagccgtgtggcggatcgtgtggcttccaaagccttttacagc

SEQ ID NO: 958 - DNA, 2024 bp, Homo sapiens
agaagctagaaagagggcatccgggttgtgcaaatttcagacacacggatatcccgtggcgcctgcgtccggagcccggccctgctgctggactgtccccggccacgcccgccgcccctcccgcatcctggccccttccccacccgacggaatcccggggaggctggaagtacaaagaaaagagcacttccctgctggggcagaggccaagccagagccctggccccatcacctctctgccctgcttgagtctggaatggacctccctgcctggaagctgcattgcccttggtcctgggcctgcctgccccctggggaacacaggcagcagccacattggcagtgaggccgtggcagcgtcggcagcagaggatgccccaggccctggagcgtgcagatggcagctgggcctgggtggtgctgctggccaccatggtgacccagggcctcaccctgggcttccccacgtgtatcggcatcttcttcactgaattgcaatgggagttccaggccagcaacagcgagacctcttggttcccctccatcctcacggctgtgctccacatggcagggcccctgtgcagcatcctggtgggacgcttcggctgccgagtgaccgtgatgctggggggcgtgctggccagcctgggcatggtggccagctccttctctcacaacctcagccagctctacttcacagcaggattcatcacaggcctgggcatgtgcttcagcttccagtcaagcatcacggtgctgggcttctactttgtccgccggcgggtgctggccaacgcgctggcctcgatgggcgtctccctgggcatcaccctctggccgctgctctcccgctaccttctggagaacctgggctggaggggtaccttccttgtcttcggcgggatctttctccactgctgcatctgcggggccatcataaggcctgtggccaccagtgtggcccctgagaccaaagaatgtcccccgccacctcccgagacacctgcacttggctgcctggctgcatgcggccggaccatccagcgccacctggccttcgacatcctgcggcacaacacaggctactgcgtgtacatactgggtgtgatgtggtccgtcctgggcttcccactgccacaagtcttcctggtgccatatgccatgtggcacagcgtggacgagcagcaggcagccctcctcatctccatcatcggcttcagcaacatcttcctgaggcccctagccgggctgatggcaggacggccggcctttgctagccaccgcaagtacctgttcagcctggcactcctgctcaatgggctcactaacctggtgtgtgcggcatcaggtgacttctgggtgctcgtgggctactgcctggcgtacagcgtgtccatgagtggcatcggcgccctcatcttccaggttctcatggacatcgtccccatggatcagttccccagagccctgggactcttcactgtcctggacggccttgctttcctcatctccccaccactggccgggttgctcctggacgccaccaacaactttagctatgttttctacatgtccagcttcttcctcatctcagctgccctcttcatgggtggcagcttctacgccctgcagaagaaggagcaaggcaagcaggctgtcgcggcggatgccctggagcgggatcttttcttggaagccaaagacggtcctgggaagcaacggtcccctgagatcatgtgccagtcttcccgccagccacgtccagctggcgtcaataagcatctttggggatgtcctgcctcctccaggaccagccatgagtggctcttatggccaaaggcggtactgcaggccaagcaaacggctctgggctggaatagccctacctgagtgccctgtttgactccgccactatctgccatgtgagttgggcaaattgttgaccacctctgagccttgaaaaagtaggaggttactttgttagagcaaaataataaaatttaattttaaaaaaaaaaaaaaaa

SEQ ID NO: 959 - DNA, 3449 bp, Homo sapiens
ccaccagacacacagacacgcacacacagctctccatgggctgccctgcgtgtgcctgagaagggtctgggatagagacctaaaattcagtcagcagatctctgtcaagggcctgccatgggccagccactctgatgagggctttcatcaacatgattgcatttaaacctcacagccaccccatgaggtaggtagcattacccctagtttaccattaatgcagtcaatcccaacaggtgacttgcccaagtcacatatctatttaagtaacagggccagcttccgaatccacatgtgtggcaccaagtctggtattctttcccccaggctgcattgtttatctctcttgcaaaatgctgttttcttccaggggctgggaaagggctactggggaggtgagacatggagatgggggtataggaggccaggagcagggccctaggctgaggtgctctgcttacccctcagaatggcctttgtgctgcaccaggctgggcccccccacagccacgggtctaggggagcagagtatgcaccgctggaggaggggcctgaagagcccctgcccctggggaacaccagcgtccgggcggcatttgtgcacgtgctgggggacctcctgcagagctttggggtactggctgcctccatcctcatctacttcaagcctcaatacaaggcagccgaccccatcagcaccttcctcttctccatctgtgcccttggatccaccgctcccaccctccgagacgttcttcgaatcctcatggaaggtaccccccgcaatgtggggttcgaacctgtgcgggatacgctgttgtcggtgccaggagtccgggcaacccatgagctgcacctgtgggcccttacgctcacttaccatgttgcctctgcacacctggccatcggtgagtcacactggccccagctagttactacctggaacataccccaccccaaacatgggaccatagcttgagttactggaattgtttcagtcttttttgatctgtctctgtttctctgtgtctctctctctcacatagacacatacacacacacacacatgcacgtgcgctcgtgcatgttggagacaaggagtctccatccactggatgcagtgttctgggggcagtttcaccctctttgaagtagcacagggaaccaacaaccctttaaaagatcattagtacctacaggtctagtgatggggcacagttaggtaaattacagcacctccaccctgaggtatcacataactgttaaaaatgatgcttgtgaagactgtacagcaactatgaaaaatgtttatggtataatgctgagaaaaaagctgaatataaaattgcatctacattatgattcaactattaaaaatatatatggtgagtcatgagctgacaaaggatttttgagtttcttccagatgcaagaagcaatcagagtcatgcaatttgtatgccaaaaatattataatttgtgggatatttgatggaaactctagagggacaatgagacagatatttaacaactggattgtcctgggaaatcgggtggtatggctgctgaaatgttgagctgtatgttgacacttaatgacaggagagaataggagactggaaagagtttagtgtgttagcatggttgattggggtgagtctctccaacatttgatttgacacttttatgctgttcatacaatacagaaagaaaagcaggcttccattcacgcctggctttaatgctgtgcagcccctttccctgtccttatctcagtccctgcctgttctttctcccccgggatggatgccgcctcttatcactctcccacagactccaccgctgaccctgaagccgtcctggctgaagcctcatcccggctctactcccggtttggattctccagctgcaccctgcaggtcgagcagtatcagccggagatggcccagtgcctgcgctgccaggaacccccccaagcctgagccatggccctgccctcaccccactgccaggccgaggctcagccccagactctcagcatctgctgccctgatcacagagacgggaccgagccaggtccataccccttcctctctccctcctaccacctgccagtttccccagcctcagccccagccccagccccagtgggcaagaccaaagtgtggcggggagtggggtgggagtcaggggaatagatgtgactagttcaggggcggggactcccaggcctcagtgtggcagggtgtgttgaaggcctgtggtgccatctccccatggttcatgtggagccacgaacatcctttccctgcagtccatttgtctgtgtggcaggctggctggctgggggcatctgcctgtctatgtgctgttggtgtgcctatgcctgggggaggtcagtaggggccccctccccacatggccctcgctctgtctatgcaggggccccaaagcccgcactttgtccgtgtgtcttagccctgtggttttgtctgtgtgtgtgtgtgtgtgtgtgtgtgtgtgtgtgtgtgtgtgttcttggtgctgtggcctgtgtgtctctgtgcctatgtggctgtgctatggtttctatgagtctgctccatccatgtgtctgtttgggggtctatctctccatccctctgttggtgctgtgcccttggctatccctgaaagagggaggactccgctgcagctccaccaataaacttgtgtctcactgcatctttcagcctgtgtgctgactcctcaggagggggaagtcaaataggtcacttgagaacaacagaatccctcctgtcccttcccagcctctggagtgacctcccacagacctcctgtcccttcccagcccctccaccctcagatggagggtaaaagccaccagtctctttactccccttcccctggctcacagcatgcctgggtccttggctcagggacagtcccatgtgccctgggcttggttgcaggagaatgctggaaggtaaggagccaaggaatccctgggagtcagtcgttctcagaggtccctgcatgccagtgggcctcaggctggctggagggaggctgggtccctttgagggagaatggctagaccatagcactgatgtgggcttggttctcaggccatctaaggtgtccagcggtagggacccctcaaccctgatagcagccaaccctgagtccaggtttaggctgtgaacaccaaggacctcttttacacctattccccctttgtcttaagaactgcatattttgacacattaagtcttaaaatcaggctcattaagggattgttgattttctctttaaaaaaaatcaaactcaagctggacatagtggcctgtgcctgtaatctcagccctttggaggctgaggcaggaggattgtttgagcccaggagttcaagaccagcctgggcaacctagggaaacccctgtctctac

SEQ ID NO: 960 - DNA, 6542 bp, Homo sapiens
ctcctccttcccttcaccacagcgttttagccagtctggacagagctatgatggcagttacaatgtgaatgctggatctcagtatgaaggacacaatgtgggttctaatgcacaggcttatggaacacaatccaattacagctatcagcctcaatctatgaagaattttgaacaggcaaagattccacaagggacccaacaggggcagcagcagcagcaaccgcagcaacaacaacacccttctcagcatgtgatgcagtatactaacgctgccaccaagctgcccctgcaaagccaagtggggcagtacaaccagcctgaggttcctgtgaggtcccccatgcagtttcaccagaacttcagccccatttctaacccttctccagctgcctctgtggttcagtctccaagctgtagttctaccccatctcctctcatgcagactggggagaatctccagtgtgggcaaggcagtgtgcctatgggttccagaaacagaattttacagttaatgcctcaactcagtccaaccccatcaatgatgcccagtcctaattctcatgctgcaggcttcaaagggtttggactagaaggggtaccagaaaagcgactgacagatcctgggttgagtagtttgagtgctctgagtactcaagtggccaatcttcctaacactgtccagcacatgttactttctgatgccctgactcctcagaagaagacctccaagaggccctcatcttccaagaaagcagatagctgcacaaattctgaaggctcctcacaacctgaagaacagctgaagtcccctatggcagagtcattagatggaggctgctccagcagttcagaggatcaaggcgagagagtgcggcaactaagtggccagagcaccagctctgacaccacctacaagggtggagcctctgagaaagctggctcctcaccggcacaaggtgctcagaatgaaccccccagactcaatgctagtcctgccgcaagagaagaggccacctcaccaggcgctaaggacatgccattgtcatccgacgggaacccaaaggttaatgagaagactgttggggtgattgtctcccgggaagccatgacaggtcgggtagaaaagcctggtggacaagataaaggctcccaagaggatgatcctgcagccactcaaaggccacctagcaatggtggggcaaaggaaaccagtcatgcatcacttccccagccagagcctccaggaggaggagggagcaaaggaaacaagaatggcgataacaactccaaccataatggagaaggaaatggccagagtggccactctgcagcgggccctggttttacgagcagaactgagcctagcaaatctcctggaagtctgcgctatagttacaaagatagtttcgggtcagccgtgccacgaaatgtcagtggctttcctcagtatcctacagggcaagaaaagggagatttcactggccatggggaacgaaagggtagaaatgaaaaattcccaagcctcctgcaggaagtgcttcagggttaccaccaccaccctgacaggagatattctaggagtactcaagagcatcaggggatggctggtagcctagaaggaaccacaaggcccaatgtcttggttagtcaaaccaatgaattagctagcaggggccttctgaacaaaagcattgggtctctattagaaaatccccactggggcccctgggaaaggaaatcaagcagcacagctcctgaaatgaaacagatcaatttgactgactatccaattcccagaaagtttgaaatagagcctcagtcatcagcacatgagcctgggggttccctctctgaaagaagatcagtgatctgtgatatttctccactaagacagattgtcagggacccaggggctcactcactgggacacatgagtgccgacaccagaattgggaggaatgaccgtctcaatccaactttaagtcagtcggtcattcttcctggtggtttggtgtccatggaaaccaagctgaaatcccagagcgggcagataaaagaggaagactttgaacagtctaaatctcaagctagtttcaacaacaagaaatctggagaccactgccatcctcctagcatcaagcatgagtcttaccgcggcaatgccagccctggagcagcaacccatgattccctttcagactatggcccgcaagacagcagacccacgccaatgcggcgggtccctggcagagttggtggtcgggagggcatgaggggtcggtccccttctcaatatcatgactttgcagaaaaattgaaaatgtctcctgggcggagcagaggcccagggggagaccctcatcacatgaatccacacatgaccttttcagagagggctaaccggagttctttacacactcccttttctcccaactcagaaaccctggcctctgcttatcatgcaaatactcgggctcatgcttatggggaccctaacgcaggtttgaattctcagctgcattataagagacagatgtaccaacagcaaccagaggagtataaagactggagcagcggttctgctcagggagtaattgctgcagcacagcacaggcaggaggggccacggaagagtccaaggcagcagcagtttcttgacagagtacggagccctctgaaaaatgacaaagatggtatgatgtatggcccaccagtggggacttaccatgaccccagtgcccaggaggctgggcgctgcctaatgtctagtgatggtctgcctaacaagggcatggaattaaagcatggctcccagaagttacaagaatcctgttgggatctttctcggcaaacttctccagccaaaagcagcggtcctccaggaatgtccagtcaaaaaaggtatgggccgccccatgagactgatggacatggactagctgaggctacacagtcatccaaacctggtagtgttatgctgagacttccaggccaggaggatcattcttctcaaaaccccttaatcatgaggaggcgtgttcgttcttttatctctcccattcccagtaagagacagtcacaagatgtaaagaacagtagcactgaagataaaggtcgcctccttcactcatcaaaagaaggcgctgataaagcattcaattcctatgcccatctttctcacagtcaggatatcaagtctatccctaagagagattcctccaaggaccttccaagtccagatagtagaaactgccctgctgttaccctcacaagccctgctaagaccaaaatactgcccccacggaaaggacggggattgaaattggaagctatagttcagaagattacatccccaaatattaggaggagcgcatcttcgaacagtgcggaggctgggggagacacggttacgcttgatgatatactgtctttgaagagtggtcctcctgaaggtgggagtgttgctgttcaggatgctgacatagagaagagaaaaggtgaggtggcttcggacctagtcagtccagcaaaccaggagttgcacgtagagaaacctcttccaaggtcttcagaagagtggcgtggcagcgtggatgacaaagtgaagacagagacacatgcagaaacagttactgccggaaaggaaccccctggtgccatgacatccacaacctcacagaagcctggtagtaaccaagggagaccagatggttccctgggtggaacagcacctttaatctttccagactcaaagaatgtacctccagtgggcatattggcccctgaggcaaaccccaaggctgaagagaaggagaacgatacagtgacgatttcaccgaagcaagagggtttccctccaaagggatatttcccatcaggaaagaagaaggggagacccattggtagtgtgaataagcaaaagaaacagcagcagccaccgcctccaccccctcagcccccacagataccagaaggttctgcagatggagagccaaagccaaaaaaacagaggcaaaggagggagagaaggaagcctggggcccagccgaggaagcgaaaaaccaaacaagcagttcccattgtggaaccccaagaacctgagatcaaactaaaatatgccacccagccactggataaaactgatgccaagaacaagtctttttacccttacatccatgtagtaaataagtgtgaacttggagccgtttgtacaatcatcaatgctgaggaagaagaacagaccaaattagtgaggggcaggaagggtcagaggtcactgacccctccacctagcagcactgaaagcaaggcgctcccggcctcgtcctttatgctgcagggacctgttgtgacagagtcttcggttatggggcacctggtttgctgtctgtgtggcaagtgggccagttaccggaacatgggtgacctctttggacctttttatccccaagattatgcagccactctcccgaagaatccacctcctaagagggccacagaaatgcagagcaaagttaaggtacggcacaaaagtgcttctaatggctccaagacggacactgaggaggaggaagagcagcagcagcagcagaaggagcagagaagcctggccgcacaccccaggtttaagcggcgccaccgctcggaagactgtggtggaggccctcggtccctgtccagggggctcccttgtaaaaaagcagccactgagggcagcagtgaaaagactgttttggactcgaagccctccgtgcccaccacttcagaaggtggccctgagctggagttacaaatccctgaactacctcttgacagcaatgaattttgggtccatgagggttgtattctctgggccaatggaatctacctggtttgtggcaggctctatggcctgcaggaagcgctggaaatagccagagagatgaaatgttcccactgccaggaggcaggcgccaccttgggctgctacaacaaaggctgctccttccgataccattacccgtgtgccattgatgcagattgtttgctacatgaggagaacttctcggtgaggtgccctaagcacaagcctccccttccgtgccctctcccccccttgcagaacaagaccgcgaaaggcagcctcagcacagagcagtcggagcgggggtgaggggggcagtgtgctcgtgggaatggaaaggacagcaagcacaggtgagactgtggagatgagaaggtggtggacactcgtgatggaatggaaatcgtcctaccgtgcagccacaccctgccctgccccgccccgccccgcccgcgtgcctgcccatgccagcacttccttaagttctcacatcacactcaaaccagtgacaccacaggaaagaaagacccaagacgttggaatggctgtttccatggacacaatctccatagtgacaatgtggggggaggggggaggggtgggatgatggggaaagggtggggggaattaaaagggagggataaatatatatatataaatctatttttagtctggaaagactttgtttaaatgaaaggtgcgctatcccttttgattctgttttaaaattatctcgttaaagatctccaaatttgttccgatgacaagtgaaatttaaatgtgagattgaactgaacaaaccctcatctcatgaaggacggggtgtgtgtgtggcgttgatctttagcctgtctcacaccagttcagaaaacactagacccaggattgaaaaagcaaaccacagcagaaccatccttttgtcattaatttgtctcaaagtgggaaggttttgggggagggggaaatacagggatggtccatgttttcaagagtaggggaatgatgtttaaacacaaaaataaattttttttcatttccagaaacactatttatttatggttttttttttttaattttttctttttgggggtgaaattggcagatgcctgaggtcatagctgtgtcctgggtcactgtggctggtgaggacctcaaggaccccatcaagtgtacacagcagcagcaaaatcaagggatgaccctcctctggggccccctgtcctcagcacattccaggcagctgtgccctgacccacagggacccgtggggatgggaggaggtccaggcctgtgttgccagagctggcagtgtgagctgtaggcagggacggggagggactgtcgctgtgatcagagtgggttaagctgaccaggaacacccatttaacccctttttctttttgctttcatttttataaaggaaaagaggacctgtcagataggcagccccatgctacgtgattctttatgttgtgttgttttgttttgtaaattgtataatttttaaatatctgagttttaaaaaaagaaaaaagtacaaaaaaatcttgttatggccttaagaaggggttagtgcatctttcaggggtcactctgccatggggataaaatagctgtttcacaaacagttttatttaaaaaaacaaaaaacaaaaaaaatcaaaaaatcaaaaaaataataaacttcattttaaccttg

SEQ ID NO: 961 - DNA, 419 bp, Homo sapiens
aagggcccctcattttggcagaacttaccatgtcgaccagccgcaaattaaagagtcatggcatgaggaggagcaagagccgatctcctcacaagggagtcaagagaggtggcagcaaaagaaaataccgtaagggcaacctgaaaagtaggaaacggggcgatgacgccaatcgcaattaccgctcccacttgtgagcccccagcgggctctgccctggtgcgcttcacacagcaccaagcagcaacaagaacagcagaaggggaactgccaaggagacctgatgttagatcaaagccagagaggagcctatggaatgtggatcaaatgccagttgtgacgaaatgaggaatgtatatgttggctgtttttccccaacatctcaataaaactttgaaagcagaaaaaaaaaaaaaaaa

SEQ ID NO: 962 - DNA, 1768 bp, Homo sapiens
gtagactgtccatggcctgaacattttccgaaaatcattttgagcaaaatatctgtttaataacaagataaccacatcaagatggttggaaagctgaagcagaacttactattggcatgtctggtgattagttctgtgactgtgttttacctgggccagcatgccatggaatgccatcaccggatagaggaacgtagccagccagtcaaattggagagcacaaggaccactgtgagaactggcctggacctcaaagccaacaaaacctttgcctatcacaaagatatgcctttaatatttattggrggtgtgcctcggagtggaaccacactcatgagggccatgctggacgcacatcctgacattcgctgtggagaggaaaccagggtcattccccgaatcctggccctgaagcagatgtggtcacggtcaagtaaagagaagatccgcctggatgaggctggtgttactgatgaagtgctggattctgccatgcaagccttcttactagaaattatcgttaagcatggggagccagccccttatttatgtaataaagatccttttgccctgaaatctttaacttacctttctaggttattccccaatgccaaatttctcctgatggtccgagatggccgggcatcagtacattcaatgatttctcgaaaagttactatagctggatttgatctgaacagctatagggactgtttgacaaagtggaatcgtgctatagagaccatgtataaccagtgtatggaggttggttataaaaagtgcatgttggttcactatgaacaacttgtcttacatcctgaacggtggatgagaacactcttaaagttcctccagattccatggaaccactcagtattgcaccatgaagagatgattgggaaagctgggggagtgtctctgtcaaaagtggagagatctacagaccaagtaatcaagccagtcaatgtaggagctctatcaaaatgggttgggaagataccgccagatgttttacaagacatggcagtgattgctcctatgcttgccaagcttggatatgacccatatgccaacccacctaactacggaaaacctgatcccaaaattattgaaaacactcgaagggtctataagggagaattccaactacctgactttcttaaagaaaaaccacagactgagcaagtggagtagcagaaccaggagcctcttccatacatgaggaaagattgctgccttttcagcagaagggaaattcctaggattggctgtcccctgccaagcttggtggagcgtctgcaccttggctgcgccgcctgtgcatttgccagtttcctcccactgagaggatggaggtgtccgcacagctttgggcctcgtgagggatctgcctcctgagcaaagagctcttgatcccgatttcatgcacagccctgcagtaaggagcccagaaggaacatgtgtttcctgttaaaactcctcttgttctcttttcttacattatgacgtttgttttcaaggagagggtttaaaaatgggatcctgtaagcagacttgggcagtctccttttgaaataggttgtctgtacatgttctaatgttttgtagaacacgtgtgcctgtttaagtgtattgatgtgaataatattaaatatcctaattatttaattcattgtattgtttctgagaagttgggaaattaccattatacatttacaacctaatgacttttgtattttatttttcaaaataaaagctttcaatgtga

SEQ ID NO: 963 - DNA, 3062 bp, Homo sapiens
ggggggggcggaggctccgtggaaatgtgtcggtgacattgaatggggagaccgagcgcgagcgaggcgcgcgcgcgcacacgcgcactcacggccccgctcgctccgagatccccggccacgtaagtaactattaataccgcctcgccgggggatgcgggcgtgctgagcgcggggattggcctcgggcaccgtcggccgtcccctttaatttttaaatacacggtcccctcttttctctggggggggcaagcaagaaatcaaagaaggaggagacaagccgtcaattttctccaaaacaaaccccaccgggcaatttggtctcggggtagggggagacggggtgattgcaaattattccaggacgagatccagttctccagcgggaaaggggcaaaggaacgccgcgcgttggaagggccagggacgcagctccccttgcagcgcccgcaggacccccgcaagctcgtgccggcgaaatcggagaccgccgatctgtcctcgttctctcctgcacgtctggctgcattcggaggaagacctggggcgcgagcgagcggcgacagcatgagcctgtgctgacctccgcgcggcgggccgagcccagggctttgtcgcggtacctgcgcccagcccgcgccgcaactctgtgcccagcttttgcaatcttttgttggcagcgctgaccgcaccaagttaaatgctcccttgcaatttttcttttttttgtttgtttgtttaatttttggagagctcgcgatcttggaaaagcctcagacgccatctacagttaaaacgtaggtaactgccctctcccgcaccccccccttacacgccccccaccctttccaccaaaaaaagggggtgcagcgcggattctggctgccgtgcgtcgccagccggtagacccgtgcttgtttcctttctctttttgtttggcttctaacgcgttgggactgagtcgccgccgtgagctccccgaagactgcacaaactaccgcgggctcctccgccccgtctgcgattcggaagccggcctgggggtcgcgtcgggagccctggcgctgcagctccgcaccttagcagcccgggtactcatccagatccacgccggggacacacacacagagtaactaaaagtgcggcgattctgcacatcgccgactgctttggggtaacaaaaagacccgagttgcctgccgaccgaggacccccgggagccgggctcggagcagacgaggtatccggcggcgcccatttgggggcttctaactctttctccacgcagcccctcttctgtcccctcccctctcgctcccttttaaaatcagtggcaccgaggcgcctgcagccgcactcgccagcgactcatctctccagcgggtttttttttgtttgtcgtgtgcgatcctcacactcatgaacatacacaggtctacccccatcacaatagcgagatatgggagatcgcggaacaaaacccaggatttcgaagagttgtcgtctataaggtccgcggagcccagccagagtttcagcccgaacctcggctccccgagcccgcccgagactccgaacttgtcgcattgcgtttcttgtatcgggaaatacttattgttggaacctctggagggagaccacgtttttcgtgccgtgcatctgcacagcggagaggagctggtgtgcaaggtgtttgatatcagctgctaccaggaatccctggcaccgtgcttttgcctgtctgctcatagtaacatcaaccaaatcactgaaattatcctgggtgagaccaaagcctatgtgttctttgagcgaagctatggggacatgcattccttcgtccgcacctgcaagaagctgagagaggaggaggcagccagactgttctaccagattgcctcggcagtggcccactgccatgacggggggctggtgctgcgggacctcaagctgcggaaattcatctttaaggacgaagagaggactcgggtcaagctggaaagcctggaagacgcctacattctgcggggagatgatgattccctctccgacaagcatggctgcccggcttacgtaagcccagagatcttgaacaccagtggcagctactcgggcaaagcagccgacgtgtggagcctgggggtgatgctgtacaccatgttggtggggcggtaccctttccatgacattgaacccagctccctcttcagcaagatccggcgtggccagttcaacattccagagactctgtcgcccaaggccaagtgcctcatccgaagcattctgcgtcgggagccctcagagcggctgacctcgcaggaaattctggaccatccttggttttctacagattttagcgtctcgaattcagcatatggtgctaaggaagtgtctgaccagctggtgccggacgtcaacatggaagagaacttggaccctttctttaactgagctcatgccccacggagacttagcaggttccaggagtgagcgagggcagcggaaaggagttcttccgggggacacgaattgcctggctgagtagcaagaaagacacactcttaagtttcttggttcagagcaggaaaaccttcaaggagctgactgaccacgtagcatgggggcaagaggcgtgggatggggattggggtgagatggatgggagcccgctggagcttgtcttccctaacatagcctgggagaccaccccttgccacttgggccacttccgcctaccccacttttcattttgttccaaaatagttgcagatcctgacagaatcaaaactctctgcctcaaacacacatcctggcatcgcactgttagcatttaacttcttgttaggattcagggaaggaacagttggccaagaattttttttcttttaaacaagccaaccacctagctggtaattaatgaggttcacttaaaaaaaaaattcggtgcacacagactgacatgaaacctgggtgctacagtaaaagaaaacaaaagtccagtttgtgtctcttaatcgctcacttcaactcatttcttctaaataaactatttaatatcctgg

SEQ ID NO: 964 - DNA, 1562 bp, Homo sapiens
gaggcatccctgcagggcgctcctccgagtccctcggcgctctgagcccacagggaagaaggaggggccggcgtcagtgacgtcagcgagaccgaggtgagcgtgggcgttgccagtggtgctctgtcagtgcctatggattatggcagggaaagtaaaatgggtcactgatatcgagaagtcagtgctgatcaataactttgaaaagagaggatgggtccaagtgacagaaaacgaggactggaatttttactggatgagtgtgcaaaccatccgaaatgtgttcagcgttgaagctggatatcggctctcagatgaccaaatagtcaaccattttccaaaccactatgaactgacccggaaggacctgatggtgaagaacatcaaaagatacaggaaggagctggagaaagaagggagtcctctggcagaaaaagatgaaaatggaaaatacctctatctggactttgttccagtcacctatatgctgcccgctgactacaacctgtttgtagaggagttccggaagagcccgtccagcacctggatcatgaagccttgtggcaaggcccagggaaagggcatcttccttatcaacaagctctcacagatcaaaaagtggtcccgggacagcaagacatcttcgtttgtgtctcaatctaataaggaagcctacgtgatctctctctatattaacaacccgttactaattggcgggaggaagttcgacctgcgcttgtacgttctggtgtccacgtaccgtccactgcgctgttacatgtacaagcttgggttttgccggttctgcacagtgaaatacaccccgagtaccagtgagctggacaacatgttcgttcatcttaccaacgtcgccatccagaaacacggggaggactacaaccacatccatgggggcaagtggacagtgagtaacctgcggctctacctggagagcacccgcggcaaggaggtgaccagcaagctgttcgacgagatccactggatcatcgtgcagtccctgaaggctgtggcgccggtgatgaacaatgacaagcactgctttgaatgctatggctacgacatcatcatcgacgacaagctgaagccctggctgatcgaggtgaatgcgtccccgtctctcacgtccagcactgccaatgaccgaatcctcaagtacaacctgattaatgacaccctcaacatcgccgtcccgaatggtgaaatcccagactgcaaatggaacaagtcgccacctaaggaagtcctcggcaattacgagattctgtatgatgaagaattggcccagggtgacggggctgaccgggagctgagaagccgtcagggtcagtctctggggcccagagcaggccgatcgagagactcagggagagcggtcctcaccacctggaagtgagtcccacctggaccttatcaaaactactcactccacctgggcccctgctgaagtcctattttgaaatttcccttttgtagagcttttttcctttcctaagccctgtaaataaatgaaggcacttctttggaaaaaaaaaaaaaaaaaa

SEQ ID NO: 965 - DNA, 2350 bp, Homo sapiens
aaactaacccctctttttctccaaaggagtgcttgtggagatcggatcttttctccagcaattgggggaaagaaggctttttctctgaattcgcttagtgtaaccagcggcgtatattttttaggcgccttttcgaaaacctagtagttaatattcatttgtttaaatcttattttatttttaagctcaaactgcttaagaataccttaattccttaaagtgaaataattttttgcaaaggggtttcctcgatttggagctttttttttcttccaccgtcatttctaactcttaaaaccaactcagttccatcatggtgatgttcaagaagatcaagtcttttgaggtggtctttaacgaccctgaaaaggtgtacggcagtggcgagaaggtggctggccgggtgatagtggaggtgtgtgaagttactcgtgtcaaagccgttaggatcctggcttgcggagtggctaaagtgctttggatgcagggatcccagcagtgcaaacagacttcgggttcagaagatcaggccttctatcctgggctgcaacatccttcgagttgaatattccttactgatctatgttagcgttcctggatccaagaaggtcatccttgacctgcccctggtaattggcagcagatcaggtctaagcagcagaacatccagcatggccagccgaaccagctctgagatgagttgggtagatctgaacatccctgataccccagaagctcctccctgctatatggatgtcattcctgaagatcaccgattggagagcccaaccactcctctgctagatgacatggatggctctcaagacagccctatctttatgtatgcccctgagttcaagttcatgccaccaccgacttatactgaggtggatccctgcatcctcaacaacaatgtgcagtgagcatgtggaagaaaagaagcagctttacctacttgtttctttttgtctctcttcctggacactcactttttcagagactcaacagtctctgcaatggagtgtgggtccaccttagcctctgacttcctaatgtaggaggtggtcagcaggcaatctcctgggccttaaaggatgcggactcatcctcagccagcgcccatgttgtgatacaggggtgtttgttggatgggtttaaaaataactagaaaaactcaggcccatccattttctcagatctccttgaaaattgaggccttttcgatagtttcgggtcaggtaaaaatggcctcctggcgtaagcttttcaaggttttttggaggctttttgtaaattgtgataggaactttggaccttgaacttacgtatcatgtggagaagagccaatttaacaaactaggaagatgaaaagggaaattgtggccaaaactttgggaaaaggaggttcttaaaatcagtgtttcccctttgtgcacttgtagaaaaaaaagaaaaaccttctagagctgatttgatggacaatggagagagctttccctgtgattataaaaaaggaagctagctgctctacggtcatctttgcttagagtatactttaacctggcttttaaagcagtagtaactgccccaccaaaggtcttaaaagccattttttggagcctattgcactgtgttctcctactgcaaatattttcatatgggaggatggttttctcttcatgtaagtccttggaattgattctaaggtgatgttcttagcactttaattcctgtcaaattttttgttctccccttctgccatcttaaatgtaagctgaaactggtctactgtgtctctagggttaagccaaaagacaaaaaaaattttactacttttgagattgccccaatgtacagaattatataattctaacgcttaaatcatgtgaaagggttgctgctgtcagccttgcccactgtgacttcaaacccaaggaggaactcttgatcaagatgcccaaccctgtgatcagaacctccaaatactgccatgagaaactagagggcaggtcttcataaaagccctttgaacccccttcctgccctgtgttaggagatagggatattggcccctcactgcagctgccagcacttggtcagtcactctcagccatagcactttgttcactgtcctgtgtcagagcactgagctccacccttttctgagagttattacagccagaaagtgtgggctgaagatggttggtttcatgtttttgtattatgtatctttttgtatggtaaagactatattttgtacttaaccagatatatttttaccccagatggggatattctttgtaaaaaatgaaaataaagtttttttaatggaaaaaaaaaaaaaaaaaaa

SEQ ID NO: 966 - DNA, 2018 bp, Homo sapiens
cgcagaaagaggaggcgcttgccttcagcttgtgggaaatcccgaagatggccaaagacaactcaactgttcgttgcttccagggcctgctgatttttggaaatgtgattattggttgttgcggcattgccctgactgcggagtgcatcttctttgtatctgaccaacacagcctctacccactgcttgaagccaccgacaacgatgacatctatggggctgcctggatcggcatatttgtgggcatctgcctcttctgcctgtctgttctaggcattgtaggcatcatgaagtccagcaggaaaattcttctggcgtatttcattctgatgtttatagtatatgcctttgaagtggcatcttgtatcacagcagcaacacaacaagactttttcacacccaacctcttcctgaagcagatgctagagaggtaccaaaacaacagccctccaaacaatgatgaccagtggaaaaacaatggagtcaccaaaacctgggacaggctcatgctccaggacaattgctgtggcgtaaatggtccatcagactggcaaaaatacacatctgccttccggactgagaataatgatgctgactatccctggcctcgtcaatgctgtgttatgaacaatcttaaagaacctctcaacctggaggcttgtaaactaggcgtgcctggtttttatcacaatcagggctgctatgaactgatctctggtccaatgaaccgacacgcctggggggttgcctggtttggatttgccattctctgctggactttttgggttctcctgggtaccatgttctactggagcagaattgaatattaagcataaagtgttgccaccatacctccttccccgagtgactctggatttggtgctggaaccagctctctcctaatattccacgtttgtgccccacactaacgtgtgtgtcttacattgccaagtcagatggtacggacttcctttaggatctcaggcttctgcagttctcatgactcctacttttcatcctagtctagcattctgcaacatttatatagactgttgaaaggagaatttgaaaaatgcataataactacttccatccctgcttatttttaatttgggaaaataaatacattcgaaggaacctgtgttatcacagtaacccagagctgtatttggctagcaatctgcctgtatctctcactattatctaaaagaaaccttccaatgcttctgttgatctcagtattgtcaggggaacagagaagttgggaaaagattactgaaatataccttttgcatttctttctagagtagctcccatatatggagatgggtgattctcttgatgccaccttcagatccttttattctccagaataattcttaacagtggttcaaatttcctttcataccttgaagtatgtgtttagtagcctcaattctccattaattaaaagtgtgggctgggcgtgggggctcatgcctgtaatcccagcactttgggaggccgaggtgggcagatcacctgaggtcaggagttcaagaccagcctggccaacatggtgaaaccccgtctctacaaaaatacaaaaattagccaggcgtgatggcaggtgcctgtaatcctagctacttggcaggctaacgcaggagaatcacttgaccgggagacagaggttgcagtgagctgagatcgtacctattgcactccatcctggatgaaagagccagactctgtctcaaaacaaacaaaaaagcgtggggacttctggggacagacaaggtgcctgttatatatttactcagtctttgccctgaatggtctcagcttgagaccatttcaaactggagagaagcaagccagccaatagaatggggtgatttacagggatttctgtttactgtcaaaatatttctcatctgcactatgtttccatttgtggtcctgaaggaaattcttataactcaacatttgtctggtcttataagtaaagacagctttaaaatctgttcactttcaaa

SEQ ID NO: 967 - DNA, 2014 bp, Homo sapiens
acgggaacagccctggctgagggagctgcagcgcagcagagtatctgacggcgccaggttgcgtaggtgcggcacgaggagttttcccggcagcgaggaggtcctgagcagcatggcccggaggagcgccttccctgccgccgcgctctggctctggagcatcctcctgtgcctgctggcactgcgggcggaggccgggccgccgcaggaggagagcctgtacctatggatcgatgctcaccaggcaagagtactcataggatttgaagaagatatcctgattgtttcagaggggaaaatggcaccttttacacatgatttcagaaaagcgcaacagagaatgccagctattcctgtcaatatccattccatgaattttacctggcaagctgcagggcaggcagaatacttctatgaattcctgtccttgcgctccctggataaaggcatcatggcagatccaaccgtcaatgtccctctgctgggaacagtgcctcacaaggcatcagttgttcaagttggtttcccatgtcttggaaaacaggatggggtggcagcatttgaagtggatgtgattgttatgaattctgaaggcaacaccattctccaaacacctcaaaatgctatcttctttaaaacatgtctacaagctgagtgcccaggcgggtgccgaaatggaggcttttgtaatgaaagacgcatctgcgagtgtcctgatgggttccacggacctcactgtgagaaagccctttgtaccccacgatgtatgaatggtggactttgtgtgactcctggtttctgcatctgcccacctggattctatggagtgaactgtgacaaagcaaactgctcaaccacctgctttaatggagggacctgtttctaccctggaaaatgtatttgccctccaggactagagggagagcagtgtgaaatcagcaaatgcccacaaccctgtcgaaatggaggtaaatgcattggtaaaagcaaatgtaagtgttccaaaggttaccagggagacctctgttcaaagcctgtctgcgagcctggctgtggtgcacatggaacctgccatgaacccaacaaatgccaatgtcaagaaggttggcatggaagacactgcaataaaaggtacgaagccagcctcatacatgccctgaggccagcaggcgcccagctcaggcagcacacgccttcacttaaaaaggccgaggagcggcgggatccacctgaatccaattacatctggtgaactccgacatctgaaacgttttaagttacaccaagttcatagcctttgttaacctttcatgtgttgaatgttcaaataatgttcattacacttaagaatactggcctgaattttattagcttcattataaatcactgagctgatatttactcttccttttaagttttctaagtacgtctgtagcatgatggtatagattttcttgtttcagtgctttgggacagattttatattatgtcaattgatcaggttaaaattttcagtgtgtagttggcagatattttcaaaattacaatgcatttatggtgtctgggggcaggggaacatcagaaaggttaaattgggcaaaaatgcgtaagtcacaagaatttggatggtgcagttaatgttgaagttacagcatttcagattttattgtcagatatttagatgtttgttacatttttaaaaattgctcttaatttttaaactctcaatacaatatattttgaccttaccattattccagagattcagtattaaaaaaaaaaaaaattacactgtggtagtggcatttaaacaatataatatattctaaacacaatgaaatagggaatataatgtatgaactttttgcattggcttgaagcaatataatatattgtaaacaaaacacagctcttacctaataaacattttatactgtttgtatgtataaaataaaggtgctgctttagttttcaaaaaaaaaaaaaaaaaaaaaaaaaaaaaaaaaaaaaaaaa

SEQ ID NO: 968 - DNA, 1878 bp, Homo sapiens
attccggggtaattcactggtccacaagcggtctcctttacgtcgaaaccaaaagaccccaacatccttgaccaagctgtctttacaggatggacataaagccaaaaagccagcatgtaaatttgaagagggtcaggatgtcctagctagatggtcagatggcttgttttatcttggcactatcaaaaagataaacatattgaaacagagctgcttcatcatatttgaagacagttctaaatcctgggttctctggaaggacattcaaacaggcaggagccactggaagtggggaaatggtctgtacaatatgtcaagaagagtattcagaagctcccaatgaaatggttatatgtgacaagtgtggccaaggatatcatcagttgtgtcacacacctcatattgattccagtgtgattgattcagatgaaaaatggctctgtcggcagtgtgtttttgcaacaacaacaaagaggggtggtgcacttaagaaaggaccaaatgccaaagcattgcaagtcatgaagcagacattaccctatagtgtggcagaccttgaatgggatgcaggtcataaaaccaatgtccagcagtgttactgctattgtggaggccctggagactggtatttgaagatgctacagtgctgcaaatgtaagcagtggtttcatgaggcttgtgtgcaatgccttcaaaagccaatgctatttggagacagattttatacgtttatatgctctgtctgcagttctggaccagaatacctcaaacgtctaccattacagtgggtagatatagcacacctatgcctttacaacctaagtgttattcataagaagaaatactttgattctgaacttgagcttatgacatacattaatgaaaactgggatagattgcaccctggagagctggcagacacaccaaaatctgaaagatatgagcatgttctggaggcattaaatgattacaagaccatgtttatgtctgggaaagaaataaagaagaagaagcatttgtttgggttgcgaattcgtgttcctcctgtgccaccaaatgtggctttcaaagcagagaaagaacctgaaggaacatctcatgaatttaaaattaaaggcagaaaggcatccaaacctatatctgattcaagggaagtaagcaatggcatagaaaaaaaaggaaagaaaaaatctgtaggtcgtccacctggcccatatacaagaaaaatgattcaaaaaactgctgagccacttttggataaggaatcaatttcagagaatcctactttggatttaccttgttctatagggagaactgagggaactgcacattcatccaatacctcagatgtggatttcacgggtgcttccagtgcaaaagaaactacctcgtctagcatttccaggcattatggattatctgactccagaaaaagaacgcgtacaggaagatcttggcctgctgcaataccacatttgcggagaagaagaggtcgtcttccaagaagagcactccagactcagaactcagaaattgtaaaagatgatgaaggcaaagaagattatcagtttgatgaactcaacacagagattctgaataacttagcagatcaggagttacaactcaatcatctaaagaactccattaccagttattttggtgctgcaggtagaatagcatgtggcgaaaaataccgagttttggcacgtcgggtgacacttgatggaaaggtgcagtatcttgtggaatgggaaggagcaactgcatcctgactgtaggactgaacattatgttcactgcactctgattttctgtaggtacagttcaaagccctaaaggagtctggcttttactatctttcttaaaaaaaaaaaaaaa

SEQ ID NO: 969 - DNA, 1035 bp, Homo sapiens
ttttcttttgagaattgctttctttagtgttaagacctactcatattttgaagaaatcttgagttaagtgagttctgaggctgctgggggaaccagatcaattcaaagctaaatacttctttcagaaaggggccactgtggaaagtgctggtggggtttgcccttgatcaagtgcctccattgtgctgcaagggctgtagacagcagggtgggacagtcagtcctccgagcagcaggaatcatcccgtcacctgcagccttcccatgcttccgcctttattcagaactttctgtgccactgtagatagctcaggcaaaactattacctgggtatttatccactaatgagtcacaagaaaaggagtggatttggtaagaatagagatttgttttatttaaaccacttcccattactgaccattaaaagctcaccactagagttcctgaaacaggtgaaacctgtatgacagcccttccactttggggagccacgcttttgatgtgacagtaccgcagagtgattcccccactgaggatgtcatcatcaaactcttctttggtgtgtgaattattagtggaaaagacccagctgtaattagacctccactgtgtacttagctggaagaacatgttaattctgcaatatgtttcttggttaaacattgcacagttcttacctcatttctgtaaataaagttttgtgaatctgttttgtattgtgacaaattcataagataacattgatattttgatttgtaatatttctaattggtagatttaattgaaaagtaaaattaatttatttttatatgttcaggggaattttaaagtcaaatcttttgtagataatttaaaaaatcagtgtggtttattttacttatttaacccactggttgttattctgtaacagtttgtataaatggtaaattttgaatgtgttgttattttacctagatgtaaaattccacatgtattaaaatgtacaaaatgttttgttaataaaatttaataatgttaaaaaaaaaaaaaaaaaaa

SEQ ID NO: 970 - DNA, 742 bp, Homo sapiens
attactgcaggaaaaggtcccggagagctgagcagtcaagatgtgtgacttcaccgaagaccagaccgcagagttcaaggaggccttccagctgtttgaccgaacaggtgatggcaagatcctgtacagccagtgtggggatgtgatgagggccctgggccagaaccctaccaacgccgaggtgctcaaggtcctggggaaccccaagagtgatgagatgaatgtgaaggtgctggactttgagcactttctgcccatgctgcagacggtggccaagaacaaggaccagggcacctatgaggattatgtcgaaggacttcgggtctttgacaaggaaggaaatggcaccgtcatgggtgctgaaatccggcatgttcttgtcacactgggtgagaagatgacagaggaagaagtagagatgctggtggcagggcatgaggacagcaatggttgtatcaactatgaagcgtttgtgaggcatatcctgtcggggtgacgggcccatggggcggagctcgtccgcatggtgctgaatggctgaggaccttcccagtctccccagagtccgtgcctttccctgtgtgaattttgtatctagcctaaagtttccctaggctttcttgtctcagcaactttcccatcttgtctctcttggatgatgtttgccgtcagcattcaccaaataaacttgctctctgggaaaaaaaaaaaaaaaaaaaaaaaaaaaaaaaaaaaaaaaaaa

SEQ ID NO: 971 - DNA, 4729 bp, Homo sapiens
cgagactcagccagaggagtacggattaagtggccgaagaaagaggagtgaggcaggggagcgaggcggacgctccgagcgcatcggactcacctgggccggcggcgagcggcgagtacgagtggactcttgccctccgcagcatgcgccccgcctgctaagtcgccgccgtctcgccctcacctagcaccgccaatcccgcctggatggagtcccctctgggttcccattggctcctgtgagtgcttgggtgtcgggagcctgtttttggcgaggggaaccaacttttgaagttcgcccagaagactgcgttccagccccagttccccggcagcgggacccggcgaagacgcgaccgcggcgcgagtcaccatgggaagcaaaggtgtctaccagtaccactggcaaagccacaatgtcaagcacagtggtgtggacgacatggtgctactgtccaagatcacagagaactccatcgtggagaatctgaagaagagatacatggatgactacatttttacatatataggatctgtattaatctcagtcaaccctttcaagcagatgccatattttggggaaaaggaaattgaaatgtaccaaggagcggcacagtatgaaaacccaccacatatctatgcccttgcagataatatgtacagaaacatgatcattgacagagagaaccagtgcgtcattatcagtggtgaaagtggtgctggaaaaacagtggctgccaaatatatcatgagctacatctccagagtgtctggaggagggaccaaagtccagcacgtgaaggacattatcctgcagtccaacccgctgctggaggccttcgggaacgccaagaccgtccggaacaacaactccagccgatttggaaaatactttgaaatccagttcagtccaggtggggaaccagatggtggaaagatctccaacttccttctggaaaaatctagggtggtgatgaggaacccaggagagcggagttttcacatattttaccagctcatcgagggcgcctctgcagagcagaaacacagccttggcatcaccagcatggactattattactacctgagcctctcgggctcatacaaggttgatgacattgacgacaggcgggagtttcaggaaactctgcacgccatgaatgtgattgggatctttgcagaagagcaaacgctggtgttgcagatagtggcgggtattctccacctgggaaacatcagcttcaaagaagttggcaactacgcggctgtggagagtgaagagtttttagcttttcctgcatatctgctagggataaaccaggaccggttgaaagaaaagctaacaagccggcagatggatagcaagtggggaggcaaatccgaatccatccacgtgaccctcaacgtagagcaggcctgttacacccgggatgcgctcgccaaggccctgcacgcccgggtctttgatttcttggtagattccatcaataaagccatggagaaagaccatgaagaatacaacattggcgtcctagacatctatggctttgaaatattccagaaaaatggctttgaacagttttgtatcaattttgttaatgaaaaactgcagcagatttttattgaactgacattaaaggcagaacaggaagaatatgttcaagagggaataagatggacacccattgagtactttaataataaaatcgtatgtgacctcatagagaacaaagtgaaccctcctggcatcatgagcatcctggatgacgtgtgcgccacgatgcatgcggtgggtgagggggcagatcagacgctgctccagaaacttcagatgcagattgggagtcatgagcacttcaacagttggaaccaaggcttcatcattcatcattatgctgggaaggtatcctatgacatggatggcttttgtgaaaggaaccgggatgtgctttttatggatctcatcgagcttatgcagagcagcgagctgcctttcataaagtctttatttccggaaaatctgcaggctgacaagaaagggcgcccaactactgccggaagcaaaataaagaaacaagccaatgaccttgtgagcaccctgatgaaatgtacgccccactacattcgctgcatcaagccaaacgaaaccaagaagcccagagactgggaggaaagcagggtaaagcatcaagtcgaatatttgggtctgaaagagaacattcgagtgagaagagctggctatgcctatcggcgcatcttccaaaaattcctacagaggtatgccattctgaccaaagccacctggccttcttggcagggagaggagaagcaaggcgtcctgcacctgctgcagtcggtcaacatggacagcgaccagttccagctggggaggagtaaagtgttcatcaaagcccccgagtctctatttcttttagaagagatgagagagagaaagtatgatgggtatgctcgagtgatacagaaatcatggaggaaattcgtggcccggaagaaatacgttcaaatgagagaagaagcctcagacctcttattgaacaagaaggagagaaggagaaacagtattaacaggaactttataggggattatattgggatggaagagcacccagaactccagcagttcgtgggcaagagggagaagattgatttcgcagacacagtcaccaagtatgacaggaggttcaagggtgtaaagcgagacctgctccttaccccaaagtgcttgtacttaatcggacgagaaaaagtcaaacagggcccagacaagggcctggtgaaagaagtcctgaagcggaaaatcgagatagaacggatcttgtctgtgtccctcagtactatgcaggatgacatttttattctccatgagcaagagtatgacagtttgcttgaatctgtcttcaaaactgaattcctaagcctcttagcaaagcgttacgaggagaagacccagaagcaactacctctgaaattcagcaatacgcttgaactgaagttgaaaaaggaaaactggggcccctggagtgcagggggctcccggcaagtgcagttccaccaagggtttggggacctggctgtcctcaagcccagtaacaaagtgctgcaggtcagcatcggacctggactgcccaagaactcccgtcctaccagaaggaacactacccaaaatacaggttattccagtgggactcaaaatgccaactacccagtgagagctgcccctcctcccccaggataccatcagaacggagtcatcagaaaccagtatgtgccatatccccatgctcctggaagccagaggtccaatcagaaaagcctgtacacctccatggcccgcccgcccttgcctcggcagcagtctaccagttcagaccgagtgtcacagacgccagagagcctggatttcctcaaggtcccggaccagggagctgcaggggtcaggagacaaacaaccagtcggcctcccccagcagggggcagacccaagccccagcccaagcccaagcctcaggtgccacagtgcaaggctttgtatgcctatgacgctcaggacacagacgaactcagctttaatgccaatgacattattgatattatcaaagaagatccttctggctggtggacgggtcgactacgaggcaagcagggcctgttccccaacaactatgtgaccaagatctgaggtgcccgtgactctgacacatggggcagaggagctccaggcacagaccaggggaggggatatttaggggctccccttacaatccacaatgagcaattgcttctccaaggcctggagctattctggtaccttccccatggaggacactgaaaaggctgggttggggacagggagtatcactccataagtgatcctaaaaggtagcctcttcataggaacccaggaggacaaaaccaccatgcattaagatttatttattgtatttaaacctggtgagaggacaagtgaggtctgctcagaccttgtaggcttctatcaaaacagcaccctgcttgctcaccaggcctagagaatggctgtaggtggccgctgacaagtgcctttagttgaagagcacatttctttcatctctcttgtccatacctgatagacacattcctctctgccaccttccttcagggaggacccgccctctgcagactgggcttagcgtgagcaggcacttcccatgtacgtgccaagggtaagctggcctgctgagcccagggcgacagaggggcactggtttacactttgccgggaccatcagggccgccaagcaggtcaggggctgggggctgggggctgggctgctggctttgctttctctgggtcttcaattagaatgtggctggcccatattggtttgtgtttaaatgctgtacttactacaagaaggatcttttttcaagctgtacatttataaaaacagatcatatactgtatatataaaaatcttgagatggtagaaacatgtatgaatgtactaagtagtattccactgtactcattcataaggtaggttttcttacaaaactcacaccaggtacttaaagatgtgctctgcttttttccaactacggagtgtcactgctttctaggtcagtccctgcagactcttctcaactctttccctataggaaacttactccgcgtcctgcccccacctcctaaataaataaaggaatcggcgaacaaaaaaaaaaaaaaa

SEQ ID NO: 972 - DNA, 668 bp, Homo sapiens
gcagcaagatggcggcggtctcaatgtcagtggtactgaggcagacgttgtggcggagaagggcagtggctgtagctgccctttccgtttccagggttccgaccaggtcgttgaggacttccacatggagattggcacaggaccagactcaagacacacaactcataacagttgatgaaaaattggatatcactactttaactggcgttccagaagagcatataaaaactagaaaagtcaggatctttgttcctgctcgcaataacatgcagtctggagtaaacaacacaaagaaatggaagatggagtttgataccagggagcgatgggaaaatcctttgatgggttgggcatcaacggctgatcccttatccaacatggttctaaccttcagtactaaagaagatgcagtttcctttgcagaaaaaaatggatggagctatgacattgaagagaggaaggttccaaaacccaagtccaagtcttatggtgcaaacttttcttggaacaaaagaacaagagtatccacaaaataggttggcactgactatatctctgcttgactgtgaataaagtcagctatgcagtatttatagtccatgtataataaatacatctcttaatctcctaataaattggacctttaaactacaaaaaaaaaaaaaaaa

SEQ ID NO: 973 - DNA, 2527 bp, Homo sapiens
ggtgtgtgtgtgagtgtggctggccccagtacctggccaagcccaccacttccacctgggccctacacccccacaatgtgtacccctcttatctgccctggagcctgtacagccatgccacgctacccctgagagtctagaaagctggtcactaactttgcagacggatgagccttgagcacccagaggagactggggctgtcaacgctgccccttgtcctgccggcttggatcccctgacagggtccttctaggcttcagactggcaccctgaccatggaaccctgaagtggcagtgacttctagagctcagtggcagaccccacgacccttcctcccccttcctccccctcccaccaccagctttcaagctcccagagggaggggtggggaggggatcctgatctcacagggcagggggcttccatcatgatgctcaactcagacaccatggagctggacctgccgcccacccactcagagactgagtcgggcttcagtgactgtgggggcggggcgggccctgatggtgccgggcctgggggtccgggagggggccaggcccgaggcccagagccgggagagcctggccggaaagacctgcagcatctgagccgcgaggagcgccggcgccggcgccgcgccacagccaagtaccgcacggcccacgccacgcgagaacgcatccgcgtggaagccttcaacctggccttcgccgagctgcgcaagctgctgcctacgctgccccccgacaagaagctctccaagattgagattctgcgcctggccatctgctatatctcctacctgaaccacgtgctggacgtctgaactcagcctgtctcccacctcccgggcctctctggggcccctttccaccgctcactgcttagaaaggccgcatcctccccgagcccttataccttggcatggagtcccaaaggccctgggcacaggcagagagcccaccggctggtcatgagggcctcttcctttctctgacccaggcacctcgagggctattctcctgggttccttccggggtttattgctgaggcccagctgtgcagaattgtttgctagtgtggttggtatggaatccttgctggctttactaagccagccacacttggagtctgcccccaagctctctcactgaatgctgcctcttctacccctatgtccaaattttcagccaccacagacctcagctgtgtatcctatctgttctagcttctcctgcccctggtggggatgggctgtcagaattgcaagggaggaaggctggggttagagtggggagtgggcttcttcctccaagatctcagtctctcagtgcttggcagaggggtgaggccctggggaggcaggggttggtgccctgactcctgtgaggggaatctcagtagctgggaattatggaaaaactcttcctgtttctgtccatcttgttcctgtggcttagcacatacagacctcagatcttacttggtagtgagtgccttgccctctttgagctatttggctacttccctgtccctctgactcctactgtcccaattttctccctccctgtgtgtcactagagaaaaaaaaaaacaaaaacctagattccggattaggggatgacatcccaaacagcccggagtatttgcagaaggctcaggcaacgagtgggccacatctcacttctgcttcctcatctcagcccactctgaaaatgtgcagcaccctcactggttcctccccccaacgcaaggaggatgcccaattgttgccctctaaaaatgcacagttctcctggccctaggacttacttattacatttttttctctttccttgagctgcctttggcaagggaagagacccccaactctgcgcccctactccatgctgctgatccccacctgcgcactatagcgcagggtcagcagtggaatgaagggccttagaacctgcatagaagaaatgaactcactgcatttctgtgctccctcctccctcgcaccaaactcctagctctacaagtatatttatttatttatttatttattcatctatttatttacttatttatttatttatttataaatattgctatttattgccgagttgtgcactttggggtagagtgaggggctcccagcagctctagctgggtctctcttgcttcctccctgcttacgcctttccttttcttgctccttcttcaactcctggtgtgtgtgagcatgccctttgcttgccacaccatatcctttccccagatccacctgtcctgacactctagtcctccaggatagtgctcctcccccagctccagggctcctggatgtccttcctcaactccctccacccctagacaatcctacctggtcccatctgcctcttttctctccccagcctgccctgtgacccttgcctcttcctgatactcccaagagcaggccccaggggtctgtgtcacatatctctgtgtgattccttctggttgcatccccaatttcatacaaaaaaaaaaaaaaa

SEQ ID NO: 974 - DNA, 1113 bp, Homo sapiens
ggcttccgcggccggggcagcgagggccgggggcggcgggcgggatgagtgcggtgtgcggtggagcggcgcggatgctgcggacgccgggacgccacggctacgccgccgagttctccccgtacctgccgggccgcctggcctgcgccaccgcgcagcactacggcatcgcgggctgtggaaccctactaatattggatccagatgaagctgggctaaggctttttagaagctttgactggaatgatggtttgtttgatgtgacttggagtgagaacaacgaacatgtcctcatcacctgtagtggcgatggctcgctgcagctctgggacactgccaaagctgcagggccactgcaagtctataaagaacacgctcaggaggtgtatagtgttgattggagccaaaccagaggtgaacagcttgtggtgtctggctcatgggatcaaactgtcaaattgtgggatccaactgttggaaagtctctgtgcacctttagaggccatgaaagtattatttatagcacaatctggtctccccacatccctggttgttttgcttcagcctcaggtgatcagactctgagaatatgggatgtgaaggcagcaggagtaagaatcgtgattcctgcacatcaggcagaaatcttgagttgtgactggtgtaaatacaatgagaatttgctggtgaccggggcggttgactgtagtttgagaggctgggacttaaggaatgtacgacaaccagtgtttgaacttcttggtcatacctatgctattaggagggtgaaattttcaccatttcatgcttctgtgctggcctcttgctcgtatgattttactgtaagattctggaacttttcaaagcctgactctcttcttgaaacagtggagcatcatacagagtttacttgtggtttagacttcagtcttcagagccccactcaggtggctgactgttcttgggatgaaacaataaagatctatgaccctgcttgtcttactattcctgcttgagatacactactttggtcagaaacagaggatgttggctgaagaactgcctaacagcaaataaattaactatggaaaacataaaaaaaaaaaaaaaaaa

SEQ ID NO: 975 - DNA, 2095 bp, Homo sapiens
aaaataaataaaacatacaaacaactaattaattggacagagagctcacttgtcctctgccctaaactctccctgcttccctgagtcctgtgggcacttaatgggtggaacagaatcaacaggtgcttgggtgaagggggtggaggtgagagaagggcctgggctgcctggtgactgtattactggttccagtgtggctcagtcacatatgccctgggaggtgataattttgagtattccctcaggacatgaatagtattcctctaaaacggaggcttcatttcatgtctgttaactgggaatacagccacaactatgtcctcggggcaaggaccactggtaaaaccaccatacttctggggtgagcacagggcaaataatgtacagacatcatttcctttgactaatctttgaaatcttggctcctgaaagtagtgaaagttctttgtctaagccgagatttttaatttaggacccagatggagtagaaggtaagcctccaaaaggtctgctttcctcagtgttttagtgtcccagattcctggcaggcagcagtctcattagaaaagcagattgccttctgactcacccactcagtgcgatgcgagacagccccacagccctcacagcagcccatattcctgctggacagggcagagcgtgcaccatccattttatagctgcagtggctacagacgcctggcccaggccatggaaaaccttgagaggagatagtctgttacggacaggagctttgtcctggaatttcctggcctttgtctgtctgggataacttcatgtactgagacgcctgttttttagagtcttcttccttctgggggaagagtgctactgcctgtcctccacagagcacttttgcttctaccaaagccatcttctccctgctgcctgcccgtgatcacccatggttcggaggtgaggggagcactgtgggcaggtgtgtgtacctggcttgcagtatactcctgaaagttgcctgtcacaaaggaaaagccataaccattggacatcaaagctgtgtcttccagcccggcccattcactctggtcctaacctttgtctgtctctcatattgcagcagaaaaagtcctacctggagcgaagcgttaaggaagctgaggacaacatccgggagatgctgatggcacgaagggcccagtagggagcctctctgggaagctcttcctcctgcccctcccattcctggtgggggcagaggagtgtctgcagggaaacagcttctcctctgccccgatggatgctttatttggatggcctggcaacatcacattttctgcatcaccctgagccccatttgcttcccagccctggagtttttacccggctttgcctgccacctctgcccaggacactcttccctctcgggatgtgtgatgaactcccaggagagggaagatgggagccagggcaagataggaagctctgcctgagctttccactaggcacgccagccagaccaataaaaagcgtctgtcccactctgctaagcctggttttcttgagcagagggatggaacagagggtgagagaggcagtggccgtctccacctcagctcctgctccctctgcatcagagcccttcctttcttgggggatgggccttgccctcttctcttttcccttcctgtacctttgactaacgctcagcttccgggcctgcatgcagtagacagaagaggaagaaagaacagatgttcacagctgaatctcagtgaacagaatagcagtccctggatggcagtctgcctaaagattcctttccctgccttctcccatacattccaaaaggaagttcaacagtaagcagcacctccaagactgtctccttttggccaatatcataagatggacgccataatcctgaggcctcctagaggctgagggggcaacggtgtgatccagctggctcatcccagcccaggtgggccaattattcaattttcaagaattttgttgcaagccagttgtcaaacacagccattataattatgtaaatttgcaaattatgttaaaaacaaggacaataaatattcaaaatgcatccctaattact

SEQ ID NO: 976 - DNA, 3311 bp, Homo sapiens
gttgctttcccgggagttcggcgtttgctggggctgcagcagctgaagtgtagtgttttcttgggactggcggtctgcacttctctcccgggttccatctccccccgcccggtggtgaggccctcgaggagggctcggacgggtgtagcgatccgcgctagaggaagacgaggcccgggaacgcatggcccccagggcaggttagggggctggaggggtcaaatcccggggtacttgtggagactctttagcgtggcttcttctctctgctgagaccccgagagctttcccagttctcctcccaggaccaccggggttcctgaagatcgggacttttctgcgcccctccaccaacagcccatctcctgtctatgaagaaagacccttcgtagaaacaacttccccgctgctgacgcgttttcccgtcccgtccccgaagtagtctactatgacctcgttgtgagcctctgaacgattttgacactttcccgaggcctagggtattatatcctaaccttactaaagaccacagaggtgcttgccattatgggaaatcagcttgctggcattgctccctcccagatcctttctgtagagagttatttttcagatattcatgactttgaatatgataaaagcctggggagtactcggttttttaaagttgctcgagccaagcaccgagaaggcctggtcgttgtgaaggtttttgcaattcaggatcccacattgcctttaaccagctataaacaagagctggaggaactgaaaatcaggcttaattctgcacagaattgtctacctttccagaaagcatcagaaaaagcatctgagaaagcagctatgctctttaggcagtatgtgcgagacaatctctatgatcgcatcagtacccgtccattcttgaataacattgagaagcgctggattgctttccagatcctgacagctgtggaccaagcacacaaatctggagttcgtcatggggacatcaagactgagaatgtgatggtcaccagttggaattgggttcttctaactgattttgccagttttaagcccacttatcttccagaagacaacccggcagatttcaattatttctttgacacatcacggaggagaacttgctatattgctcctgaacgttttgttgatggtgggatgtttgccactgagttagaatatatgagagatccttcaactccgcttgtagacttaaatagcaatcagagaacaagaggagagttgaagagagcaatggacatcttttcagcaggttgtgtgatagctgagctttttacagaaggtgtaccattatttgatctctctcaacttttggcttatagaaatggacattttttccctgaacaagtgctaaataaaattgaagatcacagtatcagagaattggtaactcagatgattcaccgtgagccagataaacgtttagaggcagaagattacttaaaacagcagcgtggcaatgcctttcctgaaatattttacacttttcttcagccctacatggcccagtttgccaaggaaacgtttctttctgcagatgagcgtattctggttatacggaaggatttgggcaacattattcacaatctctgtggacatgatctgccagaaaaagccgaaggagagcctaaggaaaatgggctggttatcttggtatctgttataacatcctgcctacagacccttaaatactgtgattccaaactagctgctttggaactgattcttcatttggctccaagattaagtgttgaaatccttttggatcgtattactccatatcttttgcatttcagcaatgactctgttcctagggtgagggctgaagccttgaggacgttgaccaaagttcttgctctcgtcaaagaggttcctcgtaatgatatcaatatttatccggaatacattctgccaggcatagcccacttagcccaagatgatgctactatcgttagactagcctatgctgaaaacatagctctgctggcagaaacagctctgagattcctggaattagtacagttaaaaaatctcaatatggaaaatgaccccaataatgaagaaatagatgaggttacacatccaaatggaaattatgacacagagctccaagccttacatgaaatggtccagcagaaagttgttactttgctaagtgaccctgaaaatattgtaaaacaaaccttgatggaaaatggaataacacggctgtgtgtattctttggacgtcagaaagccaacgatgttttgttgtcccacatgattactttcctaaatgataagaatgattggcatctacgtggagcattttttgatagtatagttggtgttgctgcctatgttggctggcaaagctcctcaattctcaagcctctgctgcaacaaggtcttagtgatgctgaggaatttgtcattgtgaaagctctttatgcccttacttgtatgtgccagttaggactgctacaaaaaccccatgtttacgaatttgccagtgatattgcccccttcctgtgtcatcccaatttatggatacgttatggtgccgtgggatttatcacagtggtagctcgtcaaataagtacagctgatgtctactgtaaactgatgccttatcttgacccatatattacccaaccaataatacagattgaaagaaaacttgttctgctcagtgttttaaaggaaccagtaagtcgttctatatttgattatgctttgaggtctaaagatattactagcttgttcagacatcttcacatgcgtcagaagaaacgaaatggttctcttcccgactgccctccgccagaggatcctgccatagcacagcttctgaagaagttgctctcacagggaatgacagaggaagaggaagacaaacttctggcactgaaagacttcatgatgaaatctaataaagcaaaggccaatatagtggaccagagccatcttcatgatagtagtcagaaaggtgtaattgacttggcagctttaggcataactgggagacaagttgatcttgttaaaaccaaacaagaaccagatgacaaacgggccagaaaacatgtaaaacaagactcaaatgtaaatgaagaatggaaaagcatgtttgggtcactggacccaccaaacatgccacaggccctacctaaagggagtgatcaggaggtgattcagactgggaaacctcctcgttccgagtcctctgctggcatttgtgtccctttgtcaacttcttcacaggttccagaagtgacaactgtccaaaaaaaaaaaaaaaaaaaaaa

SEQ ID NO: 977 - DNA, 1212 bp, Homo sapiens
ggacgattgccgctgcagccgccgccccactcacctccggtgtgtctgcagcccggacactaagggagatggatgaatgggtggggaggatgcggcgcacatggccccgggcggctcggcggtcagctgccgcccccacagcggaccggtcggggcgggggtcgggcggtagaaaaaagggccgcgaggcgagcggggcactgggcggaccgcggcggcagcatgagcggcgcagaccgtagccccaatgcgggcgcagcccctgactcggccccgggccaggcggcggtggcttcggcctaccagcgcttcgagccgcgcgcctacctccgcaacaactacgcgccccctcgcggggacctgtgcaacccgaacggcgtcgggccgtggaagctgcgctgcttggcgcagaccttcgccaccggtgaagtgtccggacgcaccctcatcgacattggttcaggccccaccgtgtaccagctgctcagtgcctgcagccactttgaggacatcaccatgacagatttcctggaggtcaaccgccaggagctggggcgctggctgcaggaggagccgggggccttcaactggagcatgtacagccaacatgcctgcctcattgagggcaagggggaatgctggcaggataaggagcgccagctgcgagccagggtgaaacgggtcctgcccatcgacgtgcaccagccccagcccctgggtgctgggagcccagctcccctgcctgctgacgccctggtctctgccttctgcttggaggctgtgagcccagatcttgccagctttcagcgggccctggaccacatcaccacgctgctgaggcctggggggcacctcctcctcatcggggccctggaggagtcgtggtacctggctggggaggccaggctgacggtggtgccagtgtctgaggaggaggtgagggaggccctggtgcgtagtggctacaaggtccgggacctccgcacctatatcatgcctgcccaccttcagacaggcgtagatgatgtcaagggcgtcttcttcgcctgggctcagaaggttgggctgtgagggctgtacctggtgccctgtggcccccacccacctggattccctgttctttgaagtggcacctaataaagaaataataccctgccaaaaaaaaaaaaaaaaaaaaaaaaaaaaaaaaaaaaaaaaaaaaaaaaaaaaaaa

SEQ ID NO: 978 - DNA, 1622 bp, Homo sapiens
catccctcaatgatccttggtgtctgtgcatctattattccctttcctgatcataaccagtcccctagaaacacataccagtctgctatgggtaagcaggctatgggagtttacatcaccaacttccatgttcgcatggacacattggcccatgttctctattatcctcaaaagccacttgtgactacacggtctatggaatatctacgatttagagagctgccagcaggcatcaactcaattgtggccattgcatcatacactggatataatcaggaagactctgttatcatgaatcgttcagctgtagaccgcggcttcttcaggtctgttttctatcgctcatacaaagaacaggagtctaaaaaaggatttgatcaagaagaagtttttgagaagcctacacgtgaaacatgccagggcatgaggcatgccatttacgacaagctggatgatgatggtttgatagctccaggggttcgtgtatcaggagatgatgttattataggcaaaacagtcaccttgcctgaaaatgaagatgaattggagagcaccaatagacgctataccaagagagactgtagcacttttctcagaactagtgagacgggcattgtggatcaggttatggtaactctcaatcaggaaggatataaattttgtaaaataagggtacgctctgttaggattccacagattggagacaaatttgctagtcgacatggtcaaaagggtacttgtggtattcagtatagacaagaggatatgcctttcacctgtgaaggtatcacccctgatatcatcatcaatccccatgccatcccctctcgtatgactattggtcacttaattgaatgccttcaagggaaggtatcggctaacaagggtgaaattggtgatgccactccatttaatgatgctgttaacgtgcagaagatttctaatcttttatctgattatggctatcatctcagaggaaatgaggtcctgtacaatgggttcactggtcgaaaaatcacatcacaaatatttattggccccacttattaccagcgtttgaagcatatggtggatgataagattcactctcgtgctaggggacctattcagatcctcaatagacagcccatggagggtagatctcgtgatggtggcctgcgttttggagaaatggaacgagattgtcagattgcccatggagcagcccagtttttaagggaaagattgtttgaggcatcagatccatatcaggttcatgtttgcaatctttgtggaataatggcgattgccaacaccaggacccatacatatgaatgcaggggctgccgcaataaaacccagatttctttggtgcgaatgccttacgcatgcaaactattgtttcaggaacttatgtctatgagtattgcaccgcgaatgatgagtgtttagctattttacaggagtcaacaagataattaaatatcttggtgtcttgtttctattgtgtggctttttaaaaatgacaaatatgtactgtgttgtgataaaaagtattttatttgtttaatgatatgcatgcttttcttctgtaaatatataataaatttttgtagatagtaaaaaaaaaaaaaaaaaaaaaa

SEQ ID NO: 979 - DNA, 1228 bp, Homo sapiens
gagtcggccatcatgctggccccggaggccgttatcttagtcatggctctaaatatgtacctgcaatcggatgttgaggatcaccgagcccgcgacgtagaagtacgggaagttcatgcgcagctgccaggccagctcgaagaaggcgagcagggtgcgggagagccccttgcagaagacgccgtacgaggttctccagcatttggctcaaggccccaagggcacatgtgacaagaaggcgccggctttttaaacattggaagttcttctgtgtcagttctgtgacagaacatttacttaacacatcatgaaggctagtttggatgtggaggggaatagactccatctatccatatgagagttggagtctcactctgttatccaggctggagttcagtggtaggatcatggcttactgcagtctggaactcctgggctcaaaccatcctcccacctcagccttctgctgcagaagaatattttgcctgctggaacctgctgtatctactcaagagtggaagttttcacagcttgtctttataaagggagctgacacgtttctcccagcacaaagttgggagtgacaccagagcctcctgcaagatgcttctgattctgctgtcagtggccctgctggccttcagctcagctcaggatttaaatgaagatgtcagccaggaagatgttcccctcgtaatatcagatggaggagactctgagcagttcatagatgaggagcgtcagggaccacctttgggaggacagcaatctcaaccctctgctggtgatgggaaccaggatgatggccctcagcagggaccaccccaacaaggaggccagcagcaacaaggtccaccacctcctcagggaaagccacaaggaccaccccaacagggaggccatccccctcctcctcaaggaaggccacaaggaccaccccaacagggaggccatccccgtcctcctcgaggaaggccacaaggaccaccccaacagggaggccatcagcaaggtcctcccccacctcctcctggaaagccccagggaccacctccccaagggggccgcccacaaggacctccacaggggcagtctcctcagtaatctaggattcaatgacaggaagtgaataagaagataacagtgtttcaaatgccgtgaaacatggcatcatgctctaacttcagtataccaataaagcaatcagcttgcaaaaaaaaaaaaaaaa

SEQ ID NO: 980 - DNA, 2018 bp, Homo sapiens
ttcaggtaccagcctggccgggacccggctgtgggaccaacgcttccggtgagcgacagaggcagctccccagggcctggagacccgtggggcggactctgggatctgagcctatcgccctggcctggagcccccctttgtacctattccccattcccctaccgagctgggcagttagccagcccactccaactctcggaaccatgtttgcagacttggattatgacatcgaagaggataaactcggaatcccgactgtgcctgggaaggtgaccctgcagaaggatgctcagaacctgatcgggatcagcattggaggaggggcccagtactgtccctgcctctatatcgtccaggtatttgacaacaccccagcagccttggacggcacagtggcagctggcgatgagatcaccggtgtcaatggcaggtcaatcaaagggaaaactaaggtggaggtggcgaagatgattcaggaggtgaagggggaggtgaccatccactacaacaagctgcaggcggaccccaagcagggcatgtccctggacattgtgttgaagaaagtcaagcaccggctggtggagaacatgagttcagggaccgcagatgctctgggcctgagccgggccatcctgtgcaatgatgggcttgtcaagaggctagaggagctggagcggaccgctgagctatacaaagggatgacggaacacaccaagaacctcctacgggccttttatgagctgtcgcagactcaccgggcctttggggacgtgttctccgtgatcggggtgcgggagccccagccagctgcgagcgaggcttttgtgaagttcgccgatgcccaccgcagcatcgagaagttcggcattcggcttctgaaaaccatcaagccgatgctgacggatctgaacacgtacctcaacaaagccatcccggacactcgcctcaccatcaagaagtacctggacgtgaagtttgagtacctgtcgtactgcctgaaggtgaaggagatggatgacgaggaatacagctgcattgccctaggcgagcccctttaccgggtgagcaccggcaactatgagtaccgcctgatcctgcgctgccgccaggaggcgcgcgcccgcttctcccagatgcgcaaggatgtgctggagaagatggagctgctggaccagaagcacgtccaggacatcgtgttccagctgcagcgcctcgtgtccaccatgtccaagtactacaacgactgctacgcagtgctgcgggatgccgacgtcttccccatcgaggtagacctggcgcacaccacattggcctatggcctcaaccaggaggagttcacagatggggaggaggaggaggaggaggaagacacggcagctggggagccgtccagggatacacgaggggctgctgggcccttggacaagggtggaagctggtgtgactcctgagtgccccgcggctgtggtgccgggggcagggtgcgtgggaggacggagcctgggagcggggcggggccgccgcgcaagggggcgacgcataaaggcctgctggcttggggcgcctgcctccctgctcctctgtcctcgcacagcgaacctgggctcctgcccaggacaggcaccagggtcatggcctgggacctggacactggcccctccaccctccctcccctcccggctccccggccagagggagagcttggtctctggacctgccttaggaaggagagggagggcaggaaggaaaagaaaggacttggaggtggcaggagtccgagccctgctccttgtgggcgctcacactgcccccggagcctgctgggagtggggccagccgtggacagctgaggttggggtcaatgcctcctgggcacccttgcctcgccccagaccggcccgtccagtccccatcacacctcggcggcctttatttattctgttcccccagctcggccacttctctgaaggagggctgggttctgggcctgtatcgaataaacacaaacctggatggcg

SEQ ID NO: 981 - DNA, 2076 bp, Homo sapiens
acattctttcagacccggcccgctgcggggcgttcctggggggtagcctcaaggccagcggggttccttcggctgcgtttctgtgggaggccctgaaacgcgcggagcttccctctgcctccaggctttcccagcgagagtgaaattaaacttgaaactcggatcaactggcagtcgttgttggtagaacgccctaaggacccctccccgcgggacggagggaggactcgggacagggaattggccctgggagaaaacgcgcggggggcgtccgagacgccccgtgaaagccgtgccgacccttgggaggactgacaggtctagagacacgcgctgtctgttgtggtgggcctcccgggaataagtgaggggctctgtgtttcgaggatggttctagcgcagagccgggtgtctgccggggtgggctccccgcattgttcgggctccggcgggggcggctctgattcctttccatggcccgcctcccaccccgggaatccccagtgctccttttccacggcttttctggcgtccccccgactctcccgcggcactttggcctaccttcccccagcgccgtggtcctccctggcgaccccctctgcgctcctggggtcctcctgcgccccccctcctccaccggcgcgctgcccacagccgcgtgccctctccccggagctggggaccaaggctgggccccgccggccgcatcggtgggaacttccgcggtccccatcccagggcgcacagggtccagctcctcggcgccgactcctggaaacaatgaaaggtattgttgcagcatctggcagtgagactgaggatgaggacagcatggacattcccttggacctttcttcatccgctggctcaggcaagagaaggagaaggggcaacctacccaaggagtctgtgcagattcttcgggattggctgtatgagcaccgttacaatgcctatccttcagagcaagaaaaagcgttgctgtcccagcaaacacacctgtctacgctacaggtctgtaactggttcatcaacgcccgccgcaggctcctccctgacatgctgagaaaggatggcaaagatccaaatcagttcacaatttcccgccgtggggccaagatttctgaaacgagctctgtggagtccgtgatgggcatcaaaaacttcatgccagctctagaggagaccccatttcattcctgtacagctgggccaaacccaaccctagggaggccactgtctcctaagccgtcatccccgggatcagttttggctcgtccatcagtgatctgccataccactgtgactgcattgaaagatgtccctttctctctctgccagtcggtcggtgtgggacaaaacacagatatacagcagatagcggccaaaaacttcacagacacctctctcatgtacccagaggacacttgtaaatctggaccaagtacgaatacacagagtggtcttttcaacactcctccccctactccaccggacctcaaccaggacttcagtggatttcagcttctagtggatgttgcactcaaacgggctgcagagatggagcttcaggcaaaacttacagcttaacccattttcaagcaaaacagttctcagaaatgtcatgattgccggggtgaaggcaagagatgaattgcattattttatatattttttattaatatttgcacatgggattgctaaaacagcttcctgttactgagatgtcttcaatggaatacagtcattccaagaactataaacttaaagctactgtagaaacaaagggttttcttttttaaatgtttcttggtagattattcataatgtgagatggttcccaatatcatgtgattttttttttcctccccttccctttttttgttattttttcagactgtgcaatacttagagaacctatagcatcttctcattcccatgtggaacaggatgcccacatactgtctaattaataaattttccattttttttcaaacaagtatgaatctagttggttgatgccttttttttcatgacataataaagtattttctttaaaaaaaaaaaaaaaaa

SEQ ID NO: 982 - DNA, 1334 bp, Homo sapiens
cgccgcgtgcgcctgcagacgctccgctcgctgccttctctcctggcaggcgctgccttttctccccgttaaagggcacttgggctgaaggatcgctttgagatctgaggaacccgcagcgctttgagggacctgaagctgtttttcttcgttttcctttgggttcagtttgaacgggaggtttttgatccctttttttcagaatggattatttgctcatgattttctctctgctgtttgtggcttgccaaggagctccagaaacagcagtcttaggcgctgagctcagcgcggtgggtgagaacggcggggagaaacccactcccagtccaccctggcggctccgccggtccaagcgctgctcctgctcgtccctgatggataaagagtgtgtctacttctgccacctggacatcatttgggtcaacactcccgagcacgttgttccgtatggacttggaagccctaggtccaagagagccttggagaatttacttcccacaaaggcaacagaccgtgagaatagatgccaatgtgctagccaaaaagacaagaagtgctggaatttttgccaagcaggaaaagaactcagggctgaagacattatggagaaagactggaataatcataagaaaggaaaagactgttccaagcttgggaaaaagtgtatttatcagcagttagtgagaggaagaaaaatcagaagaagttcagaggaacacctaagacaaaccaggtcggagaccatgagaaacagcgtcaaatcatcttttcatgatcccaagctgaaaggcaatccctccagagagcgttatgtgacccacaaccgagcacattggtgacagaccttcggggcctgtctgaagccatagcctccacggagagccctgtggccgactctgcactctccaccctggctgggatcagagcaggagcatcctctgctggttcctgactggcaaaggaccagcgtcctcgttcaaaacattccaagaaaggttaaggagttcccccaaccatcttcactggcttccatcagtggtaactgctttggtctcttctttcatctggggatgacaatggacctctcagcagaaacacacagtcacattcgaattcgggtggcatcctccggagagagagagaggaaggagattccacacaggggtggagtttctgacgaaggtcctaagggagtgtttgtgtctgactcaggcgcctggcacatttcagggagaaactccaaagtccacacaaagattttctaaggaatgcacaaattgaaaacacactcaaaagacaaacatgcaagtaaagaaaaaaaaaaaaaaaaa

SEQ ID NO: 983 - DNA, 5361 bp, Homo sapiens
tttctccttccctccacgggccgggtgagaaagtagccgggggctatcccgacccggcggttcttggggagggggccgaacaagaaaagggaggagatggagataacttccccggatttagcttttttgtctttgtttttgttctcaccacttccatcggatgactggagagtaaaagggaacccggagcggggtggcgagcagcgctttgagaaaatgcaggagtgtgtttggagacgcgtaaagttgcctttcaagctctggcctccgggcacgcgatgctccgcggcgggctgactcagggctgccttgggcctccctgccaccctcctggaaatgatgcaagtcctgactgtcacctggatccctgcagcccagcctggaatgcgtctggattaggggaaagacgagaaacgacactccaggtgttgcacggcccaccaaagcgggaagatagggcagttgctcagaccaaatactgtatctagtgcttctgctcctatcttcaatcgtggggttctttttaatgcaaagtgtcacaaggccaggaattcccatgtgtgctcagttggcccacagcatcattgtgcctaggaaactgcttcaatttatcaagtcctctgggctgggaatctcactgaattccaaacggcggaaagaggaaactttcccaacccgatgtgggtgtgacgcgagccaggggccccagggacactgtcccagagcacaccgtccccctttaacagcaactggagcttggattcgctcttatattgtacagtcctttcgaccattgccctggagcacccgcacacgcgcacgcatctccggccgcgctcacacacactcatacacacgcacgcaaacgcgtggccgccgccaggtcggcaactttgtccggcgctcccagcggcgctcggcttcctcctgtagtagttgagcgcaggccccgcctcccggccgtgttgtcaaaagggccggggtctcggattggtccagccgccgggacaacacctgctcgactccttcattcaagtgacaccagagcttccagggatatttgaggcaccatccctgccattgccgggcactcgcggcgctgctaacggcctggtcacatgctctccggagagctacgggagggcgctgggtaacctctatccgagccgcggccgcgaggaggagggaaaaggcgagcaaaaaggaagagtgggaggaggaggggaagcggcgaaggaggaagaggaggaggaggaagaggggagcacaaaggatccaggtctcccgacgggaggttaataccaagaaccatgtgtgccgagcggctgggccagttcatgaccctggctttggtgttggccacctttgacccggcgcgggggaccgacgccaccaacccacccgagggtccccaagacaggagctcccagcagaaaggccgcctgtccctgcagaatacagcggagatccagcactgtttggtcaacgctggcgatgtggggtgtggcgtgtttgaatgtttcgagaacaactcttgtgagattcggggcttacatgggatttgcatgacttttctgcacaacgctggaaaatttgatgcccagggcaagtcattcatcaaagacgccttgaaatgtaaggcccacgctctgcggcacaggttcggctgcataagccggaagtgcccggccatcagggaaatggtgtcccagttgcagcgggaatgctacctcaagcacgacctgtgcgcggctgcccaggagaacacccgggtgatagtggagatgatccatttcaaggacttgctgctgcacgaaccctacgtggacctcgtgaacttgctgctgacctgtggggaggaggtgaaggaggccatcacccacagcgtgcaggttcagtgtgagcagaactggggaagcctgtgctccatcttgagcttctgcacctcggccatccagaagcctcccacggcgccccccgagcgccagccccaggtggacagaaccaagctctccagggcccaccacggggaagcaggacatcacctcccagagcccagcagtagggagactggccgaggtgccaagggtgagcgaggtagcaagagccacccaaacgcccatgcccgaggcagagtcgggggccttggggctcagggaccttccggaagcagcgagtgggaagacgaacagtctgagtattctgatatccggaggtgaaatgaaaggcctggccacgaaatctttcctccacgccgtccattttcttatctatggacattccaaaacatttaccattagagaggggggatgtcacacgcaggattctgtggggactgtggacttcatcgaggtgtgtgttcgcggaacggacaggtgagatggagacccctggggccgtggggtctcaggggtgcctggtgaattctgcacttacacgtactcaagggagcgcgcccgcgttatcctcgtacctttgtcttctttccatctgtggagtcagtgggtgtcggccgctctgttgtgggggaggtgaaccagggaggggcagggcaaggcagggcccccagagctgggccacacagtgggtgctgggcctcgccccgaagcttctggtgcagcagcctctggtgctgtctccgcggaagtcagggcggctggattccaggacaggagtgaatgtaaaaataaatatcgcttagaatgcaggagaagggtggagaggaggcaggggccgagggggtgcttggtgccaaactgaaattcagtttcttgtgtggggccttgcggttcagagctcttggcgagggtggagggaggagtgtcatttctatgtgtaatttctgagccattgtactgtctgggctgggggggacactgtccaagggagtggcccctatgagtttatattttaaccactgcttcaaatctcgatttcactttttttatttatccagttatatctacatatctgtcatctaaataaatggctttcaaacaaagcaactgggtcattaaaaccagctcaaagggggtttaaaaaaaaaaaaccagcccatcctttgaggctgatttttcttttttttaagttctattttaaaagctatcaaacagcgacatagccatacatctgactgcctgacatggactcctgcccacttgggggaaaccttatacccagaggaaaatacacacctggggagtacatttgacaaatttcccttaggatttcgttatctcaccttgaccctcagccaagattggtaaagctgcgtcctggcgattccaggagacccagctggaaacctggcttctccatgtgaggggatgggaaaggaaagaagagaatgaagactacttagtaattcccatcaggaaatgctgaccttttacataaaatcaaggagactgctgaaaatctctaagggacaggattttccagatcctaattggaaatttagcaataaggagaggagtccaaggggacaaataaaggcagagagaagagacagaactaaaaatacgaggaaaggagagtgaggattttcattaaaagtctcagcagtgggtttcttgggttatttaaaacatcacctaaataggccttttcttcctaattggccatcaaattaaagcctatcctttctcaagcaggagctggtattgtagggagtggccgggtattctgggctgggctcttctggagtagggggtcagcaaacattgtctgcaaagggccagatactgaatccagtactttcagtttggcgagccgtgaggtctctgtcgaaactactcaactctgccgtcctagcacaaaagcagccatagacaacacacaaacgagagggcttggctcccttccaggaagatttatttaacaggctcccagctgaatttcactcacaggacacagtttactgatctctgttctagtgagtgggtcaaaaagcatatgcatccttatccgtcaactcatcagctcttcctcaaggcaacctgaggccagacaccaagaaaccaagcgtatctgctctaaaatgacttgttcctggggaatgccttcaaccaaaacacagctagtatttctatgccccaaatccaatcccagtctttcatgatccatgccggcggttgggtggggaggggaatcattggttgggggaagggaggaaaccccacctccagcccccgccaccgggctccctgggcacccagcaagatctggggctgcagagaacagaagagctggtgcacttaatccagctctgcccttggggggaggaggacctgtgtgtcaggctctgccatgggaacgagtgtaaaccgtggctgtctcctgcagtgagccaccgcggcaggcacgttgactgttttactgacatcactcaaaagctaaagcaataacattctcctgcgttgctgagtcagctgttcatttgtccgccagctcctggactggatgtgtgaaaggcatcacatttccattttcctccgtgtaaatgttttatgtgttcgcctactgatcccattcgttgcttctattgtaaatatttgtcatttgtatttattatctctgtgttttccccctaaggcataaaatggtttactgtgttcatttgaacccatttactgatctctgttgtatatttttcatgccactgctttgttttctcctcagaagtcgggtagatagcatttctatcccatccctcacgttattggaagcatgcaacagtatttattgctcagggtcttctgcttaaaactgaggaaggtccacattcctgcaagcattgattgagacatttgcacaatctaaaatgtaagcaaagtagtcattaaaaatacaccctctacttgggctttatactgcatacaaatttactcatgagccttcctttgaggaaggatgtggatctccaaataaagatttagtgtttattttgagctctgcatcttaacaagatgatctgaacacctctcctttgtatcaataaatagccctgttattctgaagtgagaggaccaagtatagtaaaatgctgacatctaaaactaaataaatagaaaacaccaggccagaactatagtcatactcacacaaagggagaaatttaaactcgaaccaagcaaaaggcttcacggaaatagcatggaaaaacaatgcttccagtggccacttcctaaggaggaacaaccccgtctgatctcagaattggcaccacgtgagcttgctaagtgataatatctgtttctactacggatttaggcaacaggacctgtacattgtcacattgcattatttttcttcaagcgttaataaaagttttaaataaatggcaaaaaaaaaaaaaaaaaa

SEQ ID NO: 984 - DNA, 1550 bp, Homo sapiens
tcaacgcctgcctcccctcgagcgtcctcagcgcagccgccgcccgcggagccagcacgaacgagcccagcaccggccggatggagcgtccgcaacccgacagcatgccccaggatttgtcagaggccctgaaggaggccaccaaggaggtgcacacccaggcagagaatgctgagttcatgaggaactttcagaagggccaggtgacccgagacggcttcaagctggtgatggcctccctgtaccacatctatgtggccctggaggaggagattgagcgcaacaaggagagcccagtcttcgcccctgtctacttcccagaagagctgcaccgcaaggctgccctggagcaggacctggccttctggtacgggccccgctggcaggaggtcatcccctacacaccagccatgcagcgctatgtgaagcggctccacgaggtggggcgcacagagcccgagctgctggtggcccacgcctacacccgctacctgggtgacctgtctgggggccaggtgctcaaaaagattgcccagaaagccctggacctgcccagctctggcgagggcctggccttcttcaccttccccaacattgccagtgccaccaagttcaagcagctctaccgctcccgcatgaactccctggagatgactcccgcagtcaggcagagggtgatagaagaggccaagactgcgttcctgctcaacatccagctctttgaggagttgcaggagctgctgacccatgacaccaaggaccagagcccctcacgggcaccagggcttcgccagcgggccagcaacaaagtgcaagattctgcccccgtggagactcccagagggaagcccccactcaacacccgctcccaggctccgcttctccgatgggtccttacactcagctttctggtggcgacagttgctgtagggctttatgccatgtgaatgcaggcatgctggctcccagggccatgaactttgtccggtggaaggccttctttctagagagggaattctcttggctggcttccttaccgtgggcactgaaggctttcagggcctccagccctctcactgtgtccctctctctggaaaggaggaaggagcctatggcatcttccccaacgaaaagcacatccaggcaatggcctaaacttcagagggggcgaaggggtcagccctgcccttcagcatcctcagttcctgcagcagagcctggaagacaccctaatgtggcagctgtctcaaacctccaaaagccctgagtttcaagtatccttgttgacacggccatgaccactttccccgtgggccatggcaatttttacacaaacctgaaaagatgttgtgtcttgtgtttttgtcttatttttgttggagccactctgttcctggctcagcctcaaatgcagtatttttgttgtgttctgttgtttttatagcagggttggggtggtttttgagccatgcgtgggtggggagggaggtgtttaacggcactgtggccttggtctaacttttgtgtgaaataataaacaacattgtctg

SEQ ID NO: 985 - DNA, 3809 bp, Homo sapiens
gccgctgttatgcgtattcccgtagacccaagcaccagccgccgcttcacacctccctccccggccttcccctgcggcggcggcggcggcaagatgggcgagaacagcggcgcgctgagcgcgcaggcggccgtggggcccggagggcgcgcccggcccgaggtgcgctcgatggtggacgtgctggcggaccacgcaggcgagctcgtgcgcaccgacagccccaacttcctctgctccgtgctgccctcgcactggcgctgcaacaagacgctgcccgtcgccttcaaggtggtggcattgggggacgtgccggatggtacggtggtgactgtgatggcaggcaatgacgagaactactccgctgagctgcgcaatgcctcggccgtcatgaagaaccaggtggccaggttcaacgaccttcgcttcgtgggccgcagtgggcgagggaagagtttcaccctgaccatcactgtgttcaccaaccccacccaagtggcgacctaccaccgagccatcaaggtgaccgtggacggaccccgggagcccagacggcaccggcagaagctggaggaccagaccaagccgttccctgaccgctttggggacctggaacggctgcgcatgcgggtgacaccgagcacacccagcccccgaggctcactcagcaccacaagccacttcagcagccagccccagaccccaatccaaggcacctcggaactgaacccattctccgacccccgccagtttgaccgctccttccccacgctgccaaccctcacggagagccgcttcccagaccccaggatgcattatcccggggccatgtcagctgccttcccctacagcgccacgccctcgggcacgagcatcagcagcctcagcgtggcgggcatgccggccaccagccgcttccaccatacctacctcccgccaccctacccgggggccccgcagaaccagagcgggcccttccaggccaacccgtccccctaccacctctactacgggacatcctctggctcctaccagttctccatggtggccggcagcagcagtgggggcgaccgctcacctacccgcatgctggcctcttgcaccagcagcgctgcctctgtcgccgccggcaacctcatgaaccccagcctgggcggccagagtgatggcgtggaggccgacggcagccacagcaactcacccacggccctgagcacgccaggccgcatggatgaggccgtgtggcggccctactgaccgccctggtggactcctcccgctggaggcggggaccctaacaaccttcaagaccagtgatgggccggctccgaggctccgggcgggaatgggacctgcgctccagggtggtctcggtcccagggtggtcccagctggtgggagcctctggctgcatctgtgcagccacatccttgtacagaggcataggttaccacccccaccccggcccgggatactgcccccggcccagatcctggccgtctcatcccatacttctgtggggaatcagcctcctgccacccccccggaaggacctcactgtctccagctatgcccagtgctgcatgggacccatgtctcctgggacagaggccatctctcttccagagagaggcagcattggcccacaggataagcctcaggccctgggaaacctcccgacccctgcaccttcgttggagcccctgcatcccctgggtccagccccctctgcatttacacagatttgagtcagaactggaaagtgtcccccacccccaccaccctcgagcggggttcccctcattgtacagatggggcaggacccagcacgctgctggcagagatggtttgagaacacatccaagccagtccccccagcccagcttcccctccgttcctaactgttggctttcccccagccgcacggtcccaggcccagagaagatgagtctatggcatcaggttcttaaaccaggaaagcacctacagaccggctcctccatgcactttaccagctcaacgcatccactctctgttctcttggcagggcgggggaggggggataggaggtcccctttcccctaggtggtctcataattccatttgtggagagaacaggagggccagatagataggtcctagcagaaggcattgaggtgagggatcattttgggtcagacatcaatgtccctgtcccccctgggtccagccaagctgtgccccatcccccaagcctcctgggaggatccagccaaatcttgcgactcctggcacacacctgtctgtaacctgttttgtgctctgaaagcaaatagtcctgagcaaaaaaaaaaaaaaaaaacaaaaaaacaaaaaaaaaacaaaacagtttttaaaactgattttagaaaaagaagcttaatctaacgttttcaaacacaaggtctcttacaggtatagttccgtgattatgatagctctgtgattataagcaacatccccgccccctctcccccccgcggacccccagctgcctcctgagggtgtggggttattagggtctcaatactttctcaaggggctacactccccatcaggcagcatcccaccagcctgcaccacaggctcccctgggaggacgagggaaacgctgatgagacgctgggcatctctcctctgtggctctaggacatctgtccaggaggctgggcggaggtgggcaggatgtgagaggtggggagtactggctgtgcgtggcaggacagaagcactgtaaagggctctccagcgcagctcagctgcactgcgttccgaggtgaagtcttgcccctgaattttgcaaaatgggaaagtgggcgcttgccaagggccaggctgcatggattctcacatcagagttctctggccctagaaaggcttagaaaaggcgtaagggaactcataaaggctagcagcatgcggtattttaactttctgcctcggcctctgtggatgcagaaatctgccctacaaaatgctcttcattggttgtctctgtgagagcactgtccccacccaacctgtcacaacggccagaaccatacaccagagacacactggcaggttaggcagtccttctggtgatcctattccattccctcctgctgcggtttctcttggcctgtcctcactggaaaaacagtctccatctcctcaaaatagttgctgactccctgcacccaaggggcctctccatgccttcttaggaagcagctatgaatccattgtccttgtagtttcttccctcctgttctctggttatagctggtcccaggtcagcgtgggaggcacctttgggttcccagtgcccagcactttgtagtctcatcccagattactaacccttcctgatcctggagaggcagggatagtaaataaattgctcttcctaccccatcccccatcccctgacaaaaagtgacggcagccgtactgagtctgtaaggcccaaagtgggtacagacagcctgggctggtaaaagtaggtccttatttacaaggctgcgttaaagttgtactaggcaaacacactgatgtaggaagcacgaggaaaggaagacgttttgatatagtgttactgtgagcctgtcagtagtgggtaccaatcttttgtgacatattgtcatgctgaggtgtgacacctgctgcactcatctgatgtaaaaccatcccagagctggcgagaggatggagctgggtggaaactgctttgcactatcgtttgcttggtgtttgtttttaacgcacaacttgcttgtacagtaaactgtcttctgtactatttaactgta

SEQ ID NO: 986 - DNA, 2283 bp, Homo sapiens
cggccgcgagttgtgactggagccacgatgcacggccaggcgcggtgagaagccagcccgtagtgcctcccgaaggagcccgggcgcagggagggtcgccctgaggacacggaggccgccaggcaggccaagggccgaggtgactgggctggggcggtagggaaggagcgagtgcgcctggctgcctccgcacggagttgtccctctctgttttcgattgacacaaacacttctccaaaagcggggaaacctaagcaacaacagcaatcaacaccaagatcttcctcctaccctcccctctttcccttctcccgcggtcggccctcgccccctcccccaggcccagcgcgggcgctcggcgcgtccagacccgcggcgcgatgccggcagtttaggatccaaagcttctctgctccttttgttctttccttcccttttttaaaaaaagaggggggaaatcccagtggtgggcagcctggcacgcacacagtcgccctcataccccgacaaaagcagatgcactttgacttctgacagctctacctcaagccccggagaactcagcggcgctttcctcgcaacccgagctcggcgagtcgtcgtcttcttcttctccgtttttatttatttatttccgttcccgccgccgttctcgctgaccttcactcctccgcgggctctgagcagaagggtcgcattctctcccgcctgagacttcttttcctcgccccgggagctcaggcggcgccgctccagcccggggccccgggactccccggctgcacacttcactgagacgcccccccaggccccgatcagcctcgtttcctccaccctactttgatttcctggtgcgagttttggcttgcacggccgagtgtgtgtcctctttttggagagactggggagctcgtgccgattgtcttcaggagtcatcccctgggctctactttgcccctctctctctctgggcctcatcagaccaaaccaaagaccatggttcactgtgccggctgcaaaaggcccatcctggaccgctttctcttgaacgtgctggacagggcctggcacgtcaagtgcgtccagtgctgtgaatgtaaatgcaacctgaccgagaagtgcttctccagggaaggcaaactctactgcaagaacgacttcttccggtgtttcggtaccaaatgcgcaggctgcgctcagggcatctcccctagcgacctggtgcggagagcgcggagcaaagtgtttcacctgaactgcttcacctgcatgatgtgtaacaagcagctctccactggcgaggaactctacatcatcgacgagaataagttcgtctgcaaagaggattacctaagtaacagcagtgttgccaaagagaacagccttcactcggccaccacgggcagtgaccccagtttgtctccggattcccaagacccgtcgcaggacgacgccaaggactcggagagcgccaacgtgtcggacaaggaagcgggtagcaacgagaatgacgaccagaacctgggcgccaagcggcggggaccgcgcaccaccatcaaagccaagcagctggagacgctgaaggccgccttcgctgctacacccaagcccacccgccacatccgcgagcagctggcgcaggagaccggcctcaacatgcgcgtcattcaggtctggttccagaaccggcgctccaaggagcggaggatgaagcagctgagcgccctgggcgcccggcgccacgccttcttccgcagtccgcgccggatgcggccgctggtggaccgcctggagccgggcgagctcatccccaatggtcccttctccttctacggagattaccagagcgagtactacgggcccgggggcaactacgacttcttcccgcaaggccccccgtcctcgcaggcccagacaccagtggacctacccttcgtgccgtcatctgggccgtccgggacgcccctgggtggcctggagcacccgctgccgggccaccacccgtcgagcgaggcgcagcggtttaccgacatcctggcgcacccacccggggactcgcccagccccgagcccagcctgcccgggcctctgcactccatgtcggccgaggtcttcggacccagcccgcccttctcgtcgctgtcggtcaacggtggggcgagctacggaaaccacctgtcccacccccccgaaatgaacgaggcggccgtgtggtagcggggtctcgcacggtctgcggagttcgtggttgtacagaaatgaacctttatttaagaaaaatag

SEQ ID NO: 987 - DNA, 2354 bp, Homo sapiens
gctcagggcacatgcctcccctccccaggccgcggcccagctgaccctcggggctcccccggcagcggacagggaagggttaaaggcccccggctccctgccccctgccctggggaacccctggccctgtggggacatgaactgtgtttgccgcctggtcctggtcgtgctgagcctgtggccagatacagctgtcgcccctgggccaccacctggcccccctcgagtttccccagaccctcgggccgagctggacagcaccgtgctcctgacccgctctctcctggcggacacgcggcagctggctgcacagctgagggacaaattcccagctgacggggaccacaacctggattccctgcccaccctggccatgagtgcgggggcactgggagctctacagctcccaggtgtgctgacaaggctgcgagcggacctactgtcctacctgcggcacgtgcagtggctgcgccgggcaggtggctcttccctgaagaccctggagcccgagctgggcaccctgcaggcccgactggaccggctgctgcgccggctgcagctcctgatgtcccgcctggccctgccccagccacccccggacccgccggcgcccccgctggcgcccccctcctcagcctgggggggcatcagggccgcccacgccatcctgggggggctgcacctgacacttgactgggccgtgaggggactgctgctgctgaagactcggctgtgacccggggcccaaagccaccaccgtccttccaaagccagatcttatttatttatttatttcagtactgggggcgaaacagccaggtgatccccccgccattatctccccctagttagagacagtccttccgtgaggcctggggggcatctgtgccttatttatacttatttatttcaggagcaggggtgggaggcaggtggactcctgggtccccgaggaggaggggactggggtcccggattcttgggtctccaagaagtctgtccacagacttctgccctggctcttccccatctaggcctgggcaggaacatatattatttatttaagcaattacttttcatgttggggtggggacggaggggaaagggaagcctgggtttttgtacaaaaatgtgagaaacctttgtgagacagagaacagggaattaaatgtgtcatacatatccacttgagggcgatttgtctgagagctggggctggatgcttgggtaactggggcagggcaggtggaggggagacctccattcaggtggaggtcccgagtgggcggggcagcgactgggagatgggtcggtcacccagacagctctgtggaggcagggtctgagccttgcctggggccccgcactgcatagggccttttgtttgttttttgagatggagtctcgctctgttgcctaggctggagtgcagtgaggcaatctgaggtcactgcaacctccacctcccgggttcaagcaattctcctgcctcagcctcccgattagctgggatcacaggtgtgcaccaccatgcccagctaattatttatttcttttgtatttttagtagagacagggtttcaccatgttggccaggctggtttcgaactcctgacctcaggtgatcctcctgcctcggcctcccaaagtgctgggattacaggtgtgagccaccacacctgacccataggtcttcaataaatatttaatggaaggttccacaagtcaccctgtgatcaacagtacccgtatgggacaaagctgcaaggtcaagatggttcattatggctgtgttcaccatagcaaactggaaacaatctagatatccaacagtgagggttaagcaacatggtgcatctgtggatagaacgccacccagccgcccggagcagggactgtcattcagggaggctaaggagagaggcttgcttgggatatagaaagatatcctgacattggccaggcatggtggctcacgcctgtaatcctggcactttgggaggacgaagcgagtggatcactgaagtccaagagttcgagaccggcctgcgagacatggcaaaaccctgtctcaaaaaagaaagaatgatgtcctgacatgaaacagcaggctacaaaaccactgcatgctgtgatcccaattttgtgtttttctttctatatatggattaaaacaaaaatcctaaagggaaatacgccaaaatgttgacaatgactgtctccaggtcaaaggagagaggtgggattgtgggtgacttttaatgtgtatgattgtctgtattttacagaatttctgccatgactgtgtattttgcatgacacattttaaaaataataaacactatttttagaat

SEQ ID NO: 988 - DNA, 776 bp, Homo sapiens
aaggacacgggcagcagacagtggtcagtcctttcttggctctgctgacactcgagcccacattccgtcacctgctcagaatcatgcaggtctccactgctgcccttgctgtcctcctctgcaccatggctctctgcaaccagttctctgcatcacttgctgctgacacgccgaccgcctgctgcttcagctacacctcccggcagattccacagaatttcatagctgactactttgagacgagcagccagtgctccaagcccggtgtcatcttcctaaccaagcgaagccggcaggtctgtgctgaccccagtgaggagtgggtccagaaatatgtcagcgacctagagctgagtgcctgaggggtccagaagcttcgaggcccagcgacctcggtgggccagtggggaggagcaggagcctgagccttgggaaacatgcgtgtgacctccacagctacctcttctatggactggttgttgccaaacagccacactgtgggactcttcttaacttaaattttaatttatttatactatttagtttttgtaatttattttcgatttcacagtgtgtttgtgattgtttgctctgagagttcccctgtcccctcccccttccctcacaccgcgtctggtgacaaccgagtggctgtcatcagcctgtgtaggcagtcatggcaccaaagccaccagactgacaaatgtgtatcggatgcttttgttcagggctgtgatcggcctggggaaataataaagcacgctcttttaaaaggt

SEQ ID NO: 989 - DNA, 3523 bp, Homo sapiens
tcgagcctggcggtagaatcttcccagtaggcggcgcgggagggaaaagaggattgaggggctaggccgggcggatcccgtcctcccccgatgtgagcagttttccgaaaccccgtcaggcgaaggctgcccagagaggtggagtcggtagcggggccgggaacatgaggcagtctctcctattcctgaccagcgtggttcctttcgtgctggcgccgcgacctccggatgacccgggcttcggcccccaccagagactcgagaagcttgattctttgctctcagactacgatattctctctttatctaatatccagcagcattcggtaagaaaaagagatctacagacttcaacacatgtagaaacactactaactttttcagctttgaaaaggcattttaaattatacctgacatcaagtactgaacgtttttcacaaaatttcaaggtcgtggtggtggatggtaaaaacgaaagcgagtacactgcaaaatggcaggacttcttcactggacacgtggttggtgagcctgactctagggttctagcccacataagagatgatgatgttataatcagaatcaacacagatggggccgaatataacatagagccactttggagatttgttaatgataccaaagacaaaagaatgttagtttataaatctgaagatatcaagaatgtttcacgtttgcagtctccaaaagtgtgtggttatttaaaagtggataatgaagagttgctcccaaaagggttagtagacagagaaccacctgaagagcttgttcatcgagtgaaaagaagagctgacccagatcccatgaagaacacgtgtaaattattggtggtagcagatcatcgcttctacagatacatgggcagaggggaagagagtacaactacaaattacttaatagagctaattgacagagttgatgacatctatcggaacacttcatgggataatgcaggttttaaaggctatggaatacagatagagcagattcgcattctcaagtctccacaagaggtaaaacctggtgaaaagcactacaacatggcaaaaagttacccaaatgaagaaaaggatgcttgggatgtgaagatgttgctagagcaatttagctttgatatagctgaggaagcatctaaagtttgcttggcacaccttttcacataccaagattttgatatgggaactcttggattagcttatgttggctctcccagagcaaacagccatggaggtgtttgtccaaaggcttattatagcccagttgggaagaaaaatatctatttgaatagtggtttgacgagcacaaagaattatggtaaaaccatccttacaaaggaagctgacctggttacaactcatgaattgggacataattttggagcagaacatgatccggatggtctagcagaatgtgccccgaatgaggaccagggagggaaatatgtcatgtatcccatagctgtgagtggcgatcacgagaacaataagatgttttcaaactgcagtaaacaatcaatctataagaccattgaaagtaaggcccaggagtgttttcaagaacgcagcaataaagtttgtgggaactcgagggtggatgaaggagaagagtgtgatcctggcatcatgtatctgaacaacgacacctgctgcaacagcgactgcacgttgaaggaaggtgtccagtgcagtgacaggaacagtccttgctgtaaaaactgtcagtttgagactgcccagaagaagtgccaggaggcgattaatgctacttgcaaaggcgtgtcctactgcacaggtaatagcagtgagtgcccgcctccaggaaatgctgaaaatgacactgtttgcttggatcttggcaagtgtaaggatgggaaatgcatccctttctgcgagagggaacagcagctggagtcctgtgcatgtaatgaaactgacaactcctgcaaggtgtgctgcagggacctttctggccgctgtgtgccctatgtcgatgctgaacaaaagaacttatttttgaggaaaggaaagccctgtacagtaggattttgtgacatgaatggcaaatgtgagaaacgagtacaggatgtaattgaacgattttgggatttcattgaccagctgagcatcaatacttttggaaagtttttagcagacaacatcgttgggtctgtcctggttttctccttgatattttggattcctttcagcattcttgtccattgtgtggataagaaattggataaacagtatgaatctctgtctctgtttcaccccagtaacgtcgaaatgctgagcagcatggattctgcatcggttcgcattatcaaaccctttcctgcgccccagactccaggccgcctgcagcctgcccctgtgatcccttcggcgccagcagctccaaaactggaccaccagagaatggacaccatccaggaagaccccagcacagactcccatatggacgaggatgggtttgagaaggaccccttcccaaatagcagcacagctgccaagtcatttgaggatctcacggaccatccggtcgccagaagtgaaaaggctgcctcctttaaactgcagcgtcagaatcgtgttaacagcaaagaaacagagtgctaatttagttctcagctcttctgacttaagtgtgcaaaatatttttatagatttgacctacaaatcaatcacagcttgtattttgtgaagactgggaagtgacttagcagatgctggtcatgtgtttgaacttcctgcaggtaaacagttcttgtgtggtttggcccttctccttttgaaaaggtaaggtgaaagtgaatctacttattttgaggctttcaggttttagtttttaaaatatcttttgacctgtggtgcaaaagcagaaaatacagctggattgggttatgaatatttacgtttttgtaaattaatcttttatattgataacagcactgactagggaaatgatcagtttttttttatacactgtaatgaaccgctgaatatgaagcatttggcatttatttgtgagaaaagtggaatagttttttttttttttttttttttttgccttcaactaaaaacaaaggagataaatttagtatacattgtatctaaattgtgggtctatttctagttattacccagagtttttatgtagcagggaaaatatatatctaaatttagaaatcatttgggttaatatggctcttcataattctaagactaatgctcagaacctaaccactaccttacagtgagggctatacatggtagccagttgaatttatggaatctaccaactgtttagggccctgatttgctgggcagtttttctgtattttataagtatcttcatgtatccctgttactgatagggatacatgtcttagaaaattcactattggctgggagtggtggctcatgcctgtaatcccagcacttggagaggctgaggttgcgccactacactccagcctgggtgacagagtgagatctgcctc

SEQ ID NO: 990 - DNA, 1496 bp, Homo sapiens
gactccgggtggcaggcgcccgggggaatcccagctgactcgctcactgccttcgaagtccggcgccccccgggagggaactgggtggccgcaccctcccggctgcggtggctgtcgccccccaccctgcagccaggactcgatggagaatccattccaatatatggccatgtggctctttggagcaatgttccatcatgttccatgctgctgctgacgtcacatggagcacagaaatcaatgttagcagatagccagcccatacaagatcgtattgtattgtaggaggcatcgtggatggatggctgctggaaaccccttgccatagccagctcttcttcaatacttaaggatttaccgtggctttgagtaatgagaatttcgaaaccacatttgagaagtatttccatccagtgctacttgtgtttacttctaaacagtcattttctaactgaagctggcattcatgtcttcattttgggctgtttcagtgcagggcttcctaaaacagaagccaactgggtgaatgtaataagtgatttgaaaaaaattgaagatcttattcaatctatgcatattgatgctactttatatacggaaagtgatgttcaccccagttgcaaagtaacagcaatgaagtgctttctcttggagttacaagttatttcacttgagtccggagatgcaagtattcatgatacagtagaaaatctgatcatcctagcaaacaacagtttgtcttctaatgggaatgtaacagaatctggatgcaaagaatgtgaggaactggaggaaaaaaatattaaagaatttttgcagagttttgtacatattgtccaaatgttcatcaacacttcttgattgcaattgattctttttaaagtgtttctgttattaacaaacatcactctgctgcttagacataacaaaacactcggcatttcaaatgtgctgtcaaaacaagtttttctgtcaagaagatgatcagaccttggatcagatgaactcttagaaatgaaggcagaaaaatgtcattgagtaatatagtgactatgaacttctctcagacttactttactcatttttttaatttattattgaaattgtacatatttgtggaataatgtaaaatgttgaataaaaatatgtacaagtgttgttttttaagttgcactgatattttacctcttattgcaaaatagcatttgtttaagggtgatagtcaaattatgtattggtggggctgggtaccaatgctgcaggtcaacagctatgctggtaggctcctgccagtgtggaaccactgactactggctctcattgacttccttactaagcatagcaaacagaggaagaatttgttatcagtaagaaaaagaagaactatatgtgaatcctcttctttatactgtaatttagttattgatgtataaagcaactgttatgaaataaagaaattgcaataactggcaaaaaaaaaaaaaaaaaaaaaaaaa

SEQ ID NO: 991 - DNA, 3697 bp, Homo sapiens
cccacgcgtccgggcagcagcgttggcccggccccgggagcggagagcgaggggaggcggagacggaggaaggtctgaggagcagcttcagtccccgccgagccgccaccgcaggtcgaggacggtcggactcccgcggcgggaggagcctgttcccctgagggtatttgaagtataccatacaactgttttgaaaatccagcgtggacaatggctactcaagctgatttgatggagttggacatggccatggaaccagacagaaaagcggctgttagtcactggcagcaacagtcttacctggactctggaatccattctggtgccactaccacagctccttctctgagtggtaaaggcaatcctgaggaagaggatgtggatacctcccaagtcctgtatgagtgggaacagggattttctcagtccttcactcaagaacaagtagctgatattgatggacagtatgcaatgactcgagctcagagggtacgagctgctatgttccctgagacattagatgagggcatgcagatcccatctacacagtttgatgctgctcatcccactaatgtccagcgtttggctgaaccatcacagatgctgaaacatgcagttgtaaacttgattaactatcaagatgatgcagaacttgccacacgtgcaatccctgaactgacaaaactgctaaatgacgaggaccaggtggtggttaataaggctgcagttatggtccatcagctttctaaaaaggaagcttccagacacgctatcatgcgttctcctcagatggtgtctgctattgtacgtaccatgcagaatacaaatgatgtagaaacagctcgttgtaccgctgggaccttgcataacctttcccatcatcgtgagggcttactggccatctttaagtctggaggcattcctgccctggtgaaaatgcttggttcaccagtggattctgtgttgttttatgccattacaactctccacaaccttttattacatcaagaaggagctaaaatggcagtgcgtttagctggtgggctgcagaaaatggttgccttgctcaacaaaacaaatgttaaattcttggctattacgacagactgccttcaaattttagcttatggcaaccaagaaagcaagctcatcatactggctagtggtggaccccaagctttagtaaatataatgaggacctatacttacgaaaaactactgtggaccacaagcagagtgctgaaggtgctatctgtctgctctagtaataagccggctattgtagaagctggtggaatgcaagctttaggacttcacctgacagatccaagtcaacgtcttgttcagaactgtctttggactctcaggaatctttcagatgctgcaactaaacaggaagggatggaaggtctccttgggactcttgttcagcttctgggttcagatgatataaatgtggtcacctgtgcagctggaattctttctaacctcacttgcaataattataagaacaagatgatggtctgccaagtgggtggtatagaggctcttgtgcgtactgtccttcgggctggtgacagggaagacatcactgagcctgccatctgtgctcttcgtcatctgaccagccgacaccaagaagcagagatggcccagaatgcagttcgccttcactatggactaccagttgtggttaagctcttacacccaccatcccactggcctctgataaaggctactgttggattgattcgaaatcttgccctttgtcccgcaaatcatgcacctttgcgtgagcagggtgccattccacgactagttcagttgcttgttcgtgcacatcaggatacccagcgccgtacgtccatgggtgggacacagcagcaatttgtggagggggtccgcatggaagaaatagttgaaggttgtaccggagcccttcacatcctagctcgggatgttcacaaccgaattgttatcagaggactaaataccattccattgtttgtgcagctgctttattctcccattgaaaacatccaaagagtagctgcaggggtcctctgtgaacttgctcaggacaaggaagctgcagaagctattgaagctgagggagccacagctcctctgacagagttacttcactctaggaatgaaggtgtggcgacatatgcagctgctgttttgttccgaatgtctgaggacaagccacaagattacaagaaacggctttcagttgagctgaccagctctctcttcagaacagagccaatggcttggaatgagactgctgatcttggacttgatattggtgcccagggagaaccccttggatatcgccaggatgatcctagctatcgttcttttcactctggtggatatggccaggatgccttgggtatggaccccatgatggaacatgagatgggtggccaccaccctggtgctgactatccagttgatgggctgccagatctggggcatgcccaggacctcatggatgggctgcctccaggtgacagcaatcagctggcctggtttgatactgacctgtaaatcatcctttaggtaagaagttttaaaaagccagtttgggtaaaatacttttactctgcctacagaacttcagaaagacttggttggtagggtgggagtggtttaggctatttgtaaatctgccacaaaaacaggtatatactttgaaaggagatgtcttggaacattggaatgttctcagatttctggttgttatgtgatcatgtgtggaagttattaactttaatgttttttgccacagcttttgcaacttaatactcaaatgagtaacatttgctgttttaaacattaatagcagcctttctctctttatacagctgtattgtctgaacttgcattgtgattggcctgtagagttgctgagagggctcgaggggtgggctggtatctcagaaagtgcctgacacactaaccaagctgagtttcctatgggaacaattgaagtaaactttttgttctggtcctttttggtcgaggagtaacaatacaaatggattttgggagtgactcaagaagtgaagaatgcacaagaatggatcacaagatggaatttagcaaaccctagccttgcttgttaaaattttttttttttttttttaagaatatctgtaatggtactgactttgcttgctttgaagtagctcttttttttttttttttttttttttttttgcagtaactgttttttaagtctctcgtagtgttaagttatagtgaatactgctacagcaatttctaatttttaagaattgagtaatggtgtagaacactaattaattcataatcactctaattaattgtaatctgaataaagtgtaacaattgtgtagcctttttgtataaaatagacaaatagaaaatggtccaattagtttcctttttaatatgcttaaaataagcaggtggatctatttcatgtttttgatcaaaaactatttgggatatgtatgggtagggtaaatcagtaagaggtgttatttggaaccttgttttggacagtttaccagttgccttttatcccaaagttgttgtaacctgctgtgatacgatgcttcaagagaaaatgcggttataaaaaatggttcagaattaaacttttaattcattcaaaaaaaaaaaaaaaaaaaaaaaaaaaaaaaaa

SEQ ID NO: 992 - DNA, 9272 bp, Homo sapiens
gggctggaggggcgctgggctcggacctgccaaggccaccgcaggggggagcaagggacagaggcgggggtcctagctgacggcttttactgcctaggatgacgctgcggcttctggtggccgcgctctgcgccgggatcctggcagaggcgccccgagtgcgagcccagcacagggagagagtgacctgcacgcgcctttacgccgctgacattgtgttcttactggatggctcctcatccattggccgcagcaatttccgcgaggtccgcagctttctcgaagggctggtgctgcctttctctggagcagccagtgcacagggtgtgcgctttgccacagtgcagtacagcgatgacccacggacagagttcggcctggatgcacttggctctgggggtgatgtgatccgcgccatccgtgagcttagctacaaggggggcaacactcgcacaggggctgcaattctccatgtggctgaccatgtcttcctgccccagctggcccgacctggtgtccccaaggtctgcatcctgatcacagacgggaagtcccaggacctggtggacacagctgcccaaaggctgaaggggcagggggtcaagctatttgctgtggggatcaagaatgctgaccctgaggagctgaagcgagttgcctcacagccaacctccgacttcttcttcttcgtcaatgacttcagcatcttgaggacactactgcccctcgtttcccggagagtgtgcacgactgctggtggcgtgcctgtgacccgacctccggatgactcgacctctgctccacgagacctggtgctgtctgagccaagcagccaatccttgagagtacagtggacagcggccagtggccctgtgactggctacaaggtccagtacactcctctgacggggctgggacagccactgccgagtgagcggcaggaggtgaacgtcccagctggtgagaccagtgtgcggctgcggggtctccggccactgaccgagtaccaagtgactgtgattgccctctacgccaacagcatcggggaggctgtgagcgggacagctcggaccactgccctagaagggccggaactgaccatccagaataccacagcccacagcctcctggtggcctggcggagtgtgccaggtgccactggctaccgtgtgacatggcgggtcctcagtggtgggcccacacagcagcaggagctgggccctgggcagggttcagtgttgctgcgtgacttggagcctggcacggactatgaggtgaccgtgagcaccctatttggccgcagtgtggggcccgccacttccctgatggctcgcactgacgcttctgttgagcagaccctgcgcccggtcatcctgggccccacatccatcctcctttcctggaacttggtgcctgaggcccgtggctaccggttggaatggcggcgtgagactggcttggagccaccgcagaaggtggtactgccctctgatgtgacccgctaccagttggatgggctgcagccgggcactgagtaccgcctcacactctacactctgctggagggccacgaggtggccacccctgcaaccgtggttcccactggaccagagctgcctgtgagccctgtaacagacctgcaagccaccgagctgcccgggcagcgggtgcgagtgtcctggagcccagtccctggtgccacccagtaccgcatcattgtgcgcagcacccagggggttgagcggaccctggtgcttcctgggagtcagacagcattcgacttggatgacgttcaggctgggcttagctacactgtgcgggtgtctgctcgagtgggtccccgtgagggcagtgccagtgtcctcactgtccgccgggagccggaaactccacttgctgttccagggctgcgggttgtggtgtcagatgcaacgcgagtgagggtggcctggggacccgtccctggagccagtggatttcggattagctggagcacaggcagtggtccggagtccagccagacactgcccccagactctactgccacagacatcacagggctgcagcctggaaccacctaccaggtggctgtgtcggtactgcgaggcagagaggagggccctgctgcagtcatcgtggctcgaacggacccactgggcccagtgaggacggtccatgtgactcaggccagcagctcatctgtcaccattacctggaccagggttcctggcgccacaggatacagggtttcctggcactcagcccacggcccagagaaatcccagttggtttctggggaggccacggtggctgagctggatggactggagccagatactgagtatacggtgcatgtgagggcccatgtggctggcgtggatgggccccctgcctctgtggttgtgaggactgcccctgagcctgtgggtcgtgtgtcgaggctgcagatcctcaatgcttccagcgacgttctacggatcacctgggtaggggtcactggagccacagcttacagactggcctggggccggagtgaaggcggccccatgaggcaccagatactcccaggaaacacagactctgcagagatccggggtctcgaaggtggagtcagctactcagtgcgagtgactgcacttgtcggggaccgcgagggcacacctgtctccattgttgtcactacgccgcctgaggctccgccagccctggggacgcttcacgtggtgcagcgcggggagcactcgctgaggctgcgctgggagccggtgcccagagcgcagggcttccttctgcactggcaacctgagggtggccaggaacagtcccgggtcctggggcccgagctcagcagctatcacctggacgggctggagccagcgacacagtaccgcgtgaggctgagtgtcctagggccggctggagaagggccctctgcagaggtgactgcgcgcactgagtcacctcgtgttccaagcattgaactacgtgtggtggacacctcgatcgactcggtgactttggcctggactccagtgtccagggcatccagctacatcctatcctggcggccactcagaggccctggccaggaagtgcctgggtccccgcagacacttccagggatctcaagctcccagcgggtgacagggctagagcctggcgtctcttacatcttctccctgacgcctgtcctggatggtgtgcggggtcctgaggcatctgtcacacagacgccagtgtgcccccgtggcctggcggatgtggtgttcctaccacatgccactcaagacaatgctcaccgtgcggaggctacgaggagggtcctggagcgtctggtgttggcacttgggcctcttgggccacaggcagttcaggttggcctgctgtcttacagtcatcggccctccccactgttcccactgaatggctcccatgaccttggcattatcttgcaaaggatccgtgacatgccctacatggacccaagtgggaacaacctgggcacagccgtggtcacagctcacagatacatgttggcaccagatgctcctgggcgccgccagcacgtaccaggggtgatggttctgctagtggatgaacccttgagaggtgacatattcagccccatccgtgaggcccaggcttctgggcttaatgtggtgatgttgggaatggctggagcggacccagagcagctgcgtcgcttggcgccgggtatggactctgtccagaccttcttcgccgtggatgatgggccaagcctggaccaggcagtcagtggtctggccacagccctgtgtcaggcatccttcactactcagccccggccagagccctgcccagtgtattgtccaaagggccagaagggggaacctggagagatgggcctgagaggacaagttgggcctcctggcgaccctggcctcccgggcaggaccggtgctcccggcccccaggggccccctggaagtgccactgccaagggcgagaggggcttccctggagcagatgggcgtccaggcagccctggccgcgccgggaatcctgggacccctggagcccctggcctaaagggctctccagggttgcctggccctcgtggggacccgggagagcgaggacctcgaggcccaaagggggagccgggggctcccggacaagtcatcggaggtgaaggacctgggcttcctgggcggaaaggggaccctggaccatcgggcccccctggacctcgtggaccactgggggacccaggaccccgtggccccccagggcttcctggaacagccatgaagggtgacaaaggcgatcgtggggagcggggtccccctggaccaggtgaaggtggcattgctcctggggagcctgggctgccgggtcttcccggaagccctggaccccaaggccccgttggcccccctggaaagaaaggagaaaaaggtgactctgaggatggagctccaggcctcccaggacaacctgggtctccgggtgagcagggcccacggggacctcctggagctattggccccaaaggtgaccggggctttccagggcccctgggtgaggctggagagaagggcgaacgtggacccccaggcccagcgggatcccgggggctgccaggggttgctggacgtcctggagccaagggtcctgaagggccaccaggacccactggccgccaaggagagaagggggagcctggtcgccctggggaccctgcagtggtgggacctgctgttgctggacccaaaggagaaaagggagatgtggggcccgctgggcccagaggagctaccggagtccaaggggaacggggcccacccggcttggttcttcctggagaccctggccccaagggagaccctggagaccggggtcccattggccttactggcagagcaggacccccaggtgactcagggcctcctggagagaagggagaccctgggcggcctggccccccaggacctgttggcccccgaggacgagatggtgaagttggagagaaaggtgacgagggtcctccgggtgacccgggtttgcctggaaaagcaggcgagcgtggccttcggggggcacctggagttcgggggcctgtgggtgaaaagggagaccagggagatcctggagaggatggacgaaatggcagccctggatcatctggacccaagggtgaccgtggggagccgggtcccccaggacccccgggacggctggtagacacaggacctggagccagagagaagggagagcctggggaccgcggacaagagggtcctcgagggcccaagggtgatcctggcctccctggagcccctggggaaaggggcattgaagggtttcggggacccccaggcccacagggggacccaggtgtccgaggcccagcaggagaaaagggtgaccggggtccccctgggctggatggccggagcggactggatgggaaaccaggagccgctgggccctctgggccgaatggtgctgcaggcaaagctggggacccagggagagacgggcttccaggcctccgtggagaacaaggcctccctggcccctctggtccccctggattaccgggaaagccaggcgaggatgggaaacctggcctgaatggaaaaaacggagaacctggggaccctggagaagacgggaggaagggagagaaaggagattcaggcgcctctgggagagaaggtcgtgatggccccaagggtgagcgtggagctcctggtatccttggaccccaggggcctccaggcctcccagggccagtgggccctcctggccagggttttcctggtgtcccaggaggcacgggccccaagggtgaccgtggggagactggatccaaaggggagcagggcctccctggagagcgtggcctgcgaggagagcctggaagtgtgccgaatgtggatcggttgctggaaactgctggcatcaaggcatctgccctgcgggagatcgtggagacctgggatgagagctctggtagcttcctgcctgtgcccgaacggcgtcgaggccccaagggggactcaggcgaacagggccccccaggcaaggagggccccatcggctttcctggagaacgcgggctgaagggcgaccgtggagaccctggccctcaggggccacctggtctggcccttggggagaggggcccccccgggccttccggccttgccggggagcctggaaagcctggtattcccgggctcccaggcagggctgggggtgtgggagaggcaggaaggccaggagagaggggagaacggggagagaaaggagaacgtggagaacagggcagagatggccctcctggactccctggaacccctgggccccccggaccccctggccccaaggtgtctgtggatgagccaggtcctggactctctggagaacagggaccccctggactcaagggtgctaagggggagccgggcagcaatggtgaccaaggtcccaaaggagacaggggtgtgccaggcatcaaaggagaccggggagagcctggaccgaggggtcaggacggcaacccgggtctaccaggagagcgtggtatggctgggcctgaagggaagccgggtctgcagggtccaagaggcccccctggcccagtgggtggtcatggagaccctggaccacctggtgccccgggtcttgctggccctgcaggaccccaaggaccttctggcctgaagggggagcctggagagacaggacctccaggacggggcctgactggacctactggagctgtgggacttcctggaccccccggcccttcaggccttgtgggtccacaggggtctccaggtttgcctggacaagtgggggagacagggaagccgggagccccaggtcgagatggtgccagtggaaaagatggagacagagggagccctggtgtgccagggtcaccaggtctgcctggccctgtcggacctaaaggagaacctggccccacgggggcccctggacaggctgtggtcgggctccctggagcaaagggagagaagggagcccctggaggccttgctggagacctggtgggtgagccgggagccaaaggtgaccgaggactgccagggccgcgaggcgagaagggtgaagctggccgtgcaggggagcccggagaccctggggaagatggtcagaaaggggctccaggacccaaaggtttcaagggtgacccaggagtcggggtcccgggctcccctgggcctcctggccctccaggtgtgaagggagatctgggcctccctggcctgcccggtgctcctggtgttgttgggttcccgggtcagacaggccctcgaggagagatgggtcagccaggccctagtggagagcggggtctggcaggccccccagggagagaaggaatcccaggacccctggggccacctggaccaccggggtcagtgggaccacctggggcctctggactcaaaggagacaagggagaccctggagtagggctgcctgggccccgaggcgagcgtggggagccaggcatccggggtgaagatggccgccccggccaggagggaccccgaggactcacggggccccctggcagcaggggagagcgtggggagaagggtgatgttgggagtgcaggactaaagggtgacaagggagactcagctgtgatcctggggcctccaggcccacggggtgccaagggggacatgggtgaacgagggcctcggggcttggatggtgacaaaggacctcggggagacaatggggaccctggtgacaagggcagcaagggagagcctggtgacaagggctcagccgggttgccaggactgcgtggactcctgggaccccagggtcaacctggtgcagcagggatccctggtgacccgggatccccaggaaaggatggagtgcctggtatccgaggagaaaaaggagatgttggcttcatgggtccccggggcctcaagggtgaacggggagtgaagggagcctgtggccttgatggagagaagggagacaagggagaagctggtcccccaggccgccccgggctggcaggacacaaaggagagatgggggagcctggtgtgccgggccagtcgggggcccctggcaaggagggcctgatcggtcccaagggtgaccgaggctttgacgggcagccaggccccaagggtgaccagggcgagaaaggggagcggggaaccccaggaattgggggcttcccaggccccagtggaaatgatggctctgctggtcccccagggccacctggcagtgttggtcccagaggccccgaaggacttcagggccagaagggtgagcgaggtccccccggagagagagtggtgggggctcctggggtccctggagctcctggcgagagaggggagcaggggcggccagggcctgccggtcctcgaggcgagaagggagaagctgcactgacggaggatgacatccggggctttgtgcgccaagagatgagtcagcactgtgcctgccagggccagttcatcgcatctggatcacgacccctccctagttatgctgcagacactgccggctcccagctccatgctgtgcctgtgctccgcgtctctcatgcagaggaggaagagcgggtaccccctgaggatgatgagtactctgaatactccgagtattctgtggaggagtaccaggaccctgaagctccttgggatagtgatgacccctgttccctgccactggatgagggctcctgcactgcctacaccctgcgctggtaccatcgggctgtgacaggcagcacagaggcctgtcacccttttgtctatggtggctgtggagggaatgccaaccgttttgggacccgtgaggcctgcgagcgccgctgcccaccccgggtggtccagagccaggggacaggtactgcccaggactgaggcccagataatgagctgagattcagcatcccctggaggagtcggggtctcagcagaaccccactgtccctccccttggtgctagaggcttgtgtgcacgtgagcgtgcgagtgcacgtccgttatttcagtgacttggtcccgtgggtctagccttcccccctgtggacaaacccccattgtggctcctgccaccctggcagatgactcactgtgggggggtggctgtgggcagtgagcggatgtgactggcgtctgacccgccccttgacccaagcctgtgatgacatggtgctgattctggggggcattaaagctgctgttttaaaaggcaaaaaa

SEQ ID NO: 993 - DNA, 1172 bp, Homo sapiens
gagacattcctcaattgcttagacatattctgagcctacagcagaggaacctccagtctcagcaccatgaatcaaactgcgattctgatttgctgccttatctttctgactctaagtggcattcaaggagtacctctctctagaaccgtacgctgtacctgcatcagcattagtaatcaacctgttaatccaaggtctttagaaaaacttgaaattattcctgcaagccaattttgtccacgtgttgagatcattgctacaatgaaaaagaagggtgagaagagatgtctgaatccagaatcgaaggccatcaagaatttactgaaagcagttagcaaggaaatgtctaaaagatctccttaaaaccagaggggagcaaaatcgatgcagtgcttccaaggatggaccacacagaggctgcctctcccatcacttccctacatggagtatatgtcaagccataattgttcttagtttgcagttacactaaaaggtgaccaatgatggtcaccaaatcagctgctactactcctgtaggaaggttaatgttcatcatcctaagctattcagtaataactctaccctggcactataatgtaagctctactgaggtgctatgttcttagtggatgttctgaccctgcttcaaatatttccctcacctttcccatcttccaagggtactaaggaatctttctgctttggggtttatcagaattctcagaatctcaaataactaaaaggtatgcaatcaaatctgctttttaaagaatgctctttacttcatggacttccactgccatcctcccaaggggcccaaattctttcagtggctacctacatacaattccaaacacatacaggaaggtagaaatatctgaaaatgtatgtgtaagtattcttatttaatgaaagactgtacaaagtataagtcttagatgtatatatttcctatattgttttcagtgtacatggaataacatgtaattaagtactatgtatcaatgagtaacaggaaaattttaaaaatacagatagatatatgctctgcatgttacataagataaatgtgctgaatggttttcaaataaaaatgaggtactctcctggaaatattaagaaagactatctaaatgttgaaagatcaaaaggttaataaagtaattataact

SEQ ID NO: 994 - DNA, 2019 bp, Homo sapiens
tgggtcacggctgcttcccaccagcaaagaccacgactggagagccgagccggaggcagctgggaaacatgaagagcgtcttgctgctgaccacgctcctcgtgcctgcacacctggtggccgcctggagcaataattatgcggtggactgccctcaacactgtgacagcagtgagtgcaaaagcagcccgcgctgcaagaggacagtgctcgacgactgtggctgctgccgagtgtgcgctgcagggcggggagaaacttgctaccgcacagtctcaggcatggatggcatgaagtgtggcccggggctgaggtgtcagccttctaatggggaggatccttttggtgaagagtttggtatctgcaaagactgtccctacggcaccttcgggatggattgcagagagacctgcaactgccagtcaggcatctgtgacagggggacgggaaaatgcctgaaattccccttcttccaatattcagtaaccaagtcttccaacagatttgtttctctcacggagcatgacatggcatctggagatggcaatattgtgagagaagaagttgtgaaagagaatgctgccgggtctcccgtaatgaggaaatggttaaatccacgctgatcccggctgtgatttctgagagaaggctctattttcgtgattgttcaacacacagccaacattttaggaactttctagatatagcataagtacatgtaatttttgaagatccaaattgtgatgcatggtggatccagaaaacaaaaagtaggatacttacaatccataacatccatatgactgaacacttgtatgtgtttgttaaatattcgaatgcatgtagatttgttaaatgtgtgtgtatagtaacactgaagaactaaaaatgcaatttaggtaatcttacatggagacaggtcaaccaaagagggagctaggcaaagctgaagaccgcagtgagtcaaattagttctttgactttgatgtacattaatgttgggatatggaatgaagacttaagagcaggagaagatggggagggggtgggagtgggaaataaaatatttagcccttccttggtaggtagcttctctagaatttaattgtgctttttttttttttttggctttgggaaaagtcaaaataaaacaaccagaaaacccctgaaggaagtaagatgtttgaagcttatggaaatttgagtaacaaacagctttgaactgagagcaatttcaaaaggctgctgatgtagttcccgggttacctgtatctgaaggacggttctggggcataggaaacacatacacttccataaatagctttaacgtatgccacctcagagataaatctaagaagtattttacccactggtggtttgtgtgtgtatgaaggtaaatatttatatatttttataaataaatgtgttagtgcaagtcatcttccctacccatatttatcatcctcttgaggaaagaaatctagtattatttgttgaaaatggttagaataaaaacctatgactctataaggttttcaaacatctgaggcatgataaatttattatccataattataggagtcactctggatttcaaaaaatgtcaaaaaatgagcaacagagggaccttatttaaacataagtgctgtgacttcggtgaattttcaatttaaggtatgaaaataagtttttaggaggtttgtaaaagaagaatcaattttcagcagaaaacatgtcaactttaaaatataggtggaattaggagtatatttgaaagaatcttagcacaaacaggactgttgtactagatgttcttaggaaatatctcagaagtattttatttgaagtgaagaacttatttaagaattatttcagtatttacctgtattttattcttgaagttggccaacagagttgtgaatgtgtgtggaaggcctttgaatgtaaagctgcataagctgttaggttttgttttaaaaggacatgtttattattgttcaataaaaaagaacaagatac

SEQ ID NO: 995 - DNA, 6480 bp, Homo sapiens
agagcgagcaggggagagcgagaccagttttaaggggaggaccggtgcgagtgaggcagccccgaggctctgctcgcccaccacccaatcctcgcctcccttctgctccaccttctctctctgccctcacctctcccccgaaaaccccctatttagccaaaggaaggaggtcaggggaacgctctcccctccccttccaaaaaacaaaaacagaaaaacccttttccaggccggggaaagcaggagggagaggggccgccgggctggccatggagctgctgtgccacgaggtggacccggtccgcagggccgtgcgggaccgcaacctgctccgagacgaccgcgtcctgcagaacctgctcaccatcgaggagcgctaccttccgcagtgctcctacttcaagtgcgtgcagaaggacatccaaccctacatgcgcagaatggtggccacctggatgctggaggtctgtgaggaacagaagtgcgaagaagaggtcttccctctggccatgaattacctggaccgtttcttggctggggtcccgactccgaagtcccatctgcaactcctgggtgctgtctgcatgttcctggcctccaaactcaaagagaccagcccgctgaccgcggagaagctgtgcatttacaccgacaactccatcaagcctcaggagctgctggagtgggaactggtggtgctggggaagttgaagtggaacctggcagctgtcactcctcatgacttcattgagcacatcttgcgcaagctgccccagcagcgggagaagctgtctctgatccgcaagcatgctcagaccttcattgctctgtgtgccaccgactttaagtttgccatgtacccaccgtcgatgatcgcaactggaagtgtgggagcagccatctgtgggctccagcaggatgaggaagtgagctcgctcacttgtgatgccctgactgagctgctggctaagatcaccaacacagacgtggattgtctcaaagcttgccaggagcagattgaggcggtgctcctcaatagcctgcagcagtaccgtcaggaccaacgtgacggatccaagtcggaggatgaactggaccaagccagcacccctacagacgtgcgggatatcgacctgtgaggatgccagttgggccgaaagagagagacgcgtccataatctggtctcttcttctttctggttgtttttgttctttgtgttttagggtgaaacttaaaaaaaaaattctgcccccacctagatcatatttaaagatcttttagaagtgagagaaaaaggtcctacgaaaacggaataataaaaagcatttggtgcctatttgaagtacagcataagggaatcccttgtatatgcgaacagttattgtttgattatgtaaaagtaatagtaaaatgcttacaggaaaacctgcagagtagttagagaatatgtatgcctgcaatatgggaacaaattagaggagacttttttttttcatgttatgagctagcacatacacccccttgtagtataatttcaaggaactgtgtacgccatttatggcatgattagattgcaaagcaatgaactcaagaaggaattgaaataaggagggacatgatggggaaggagtacaaaacaatctctcaacatgattgaaccatttgggatggagaagcacctttgctctcagccacctgttactaagtcaggagtgtagttggatctctacattaatgtcctcttgctgtctacagtagctgctacctaaaaaaagatgttttattttgccagttggacacaggtgattggctcctgggtttcatgttctgtgacatcctgcttcttcttccaaatgcagttcattgcagacaccaccatattgctatctaatggggaaatgtagctatgggccataaccaaaactcacatgaaacggaggcagatggagaccaagggtgggatccagaatggagtcttttctgttattgtatttaaaagggtaatgtggccttggcatttcttcttagaaaaaaactaatttttggtgctgattggcatgtctggttcacagtttagcattgttataaaccattccattcgaaaagcactttgaaaaattgttcccgagcgatagatgggatggtttatgcaagtcatgctgaatactcctcccctcttctcttttgccccctcccttcctgcccccagtctgggttactcttcgcttctggtatctggcgttctttggtacacagttctggtgttcctaccaggactcaagagacaccccttcctgctgacattcccatcacaacattcctcagacaagcctgtaaactaaaatctgttaccattctgatggcacagaaggatcttaattcccatctctatacttctcctttggacatggaaagaaaagttattgctggtgcaaagatagatggctgaacatcagggtgtggcattttgttcccttttccgttttttttttttttattgttgttgttaattttattgcaaagttgtattcagcgtacttgaatttttcttcctctccacttcttagaggcattcagttagcaaagaggttggagcaacaacttttttttttttttttgcacaattgtaattgacaggtaatgaagctatttgttaaaatatttgcctttttaagtaaaaaagaaaaatcagaacagggctatttgaagaattattttatacacagattctgccttgtttcatagtatgagggttgaagacggaaaacaatctaagggtctctcatttttttaattttgttttgttcagtttggtttttttttttttttgcgctgctaagaagctaaagtcatccatccttattcacgttgacagtacctagctgtaatgtttcacagagtgtgctgctattttataaacatttttataatatattattttactgcttaaattccaagtcctgaagtagatggttgagatatgagttcttcgtactggaaaagcccttccgtagtttgttttcttctggtagcatattcatggttgtttttttttttcttttttggttttttggttttttttttttcctctgatcacattcttcaaagacggagtattctttacctcaggtttactggacaaaatcaataactacaaaaggcaatgattcacgcttttgttttcataatacctcacaaccgtacagtttctgcttgggagcccattcgcatgaggaatacagaagcagtgtgagcagggctgactccctctcaggtggaaggcagggcggtctcactcccagggacctttttggtcatggaggccatcgggctcccagttagaccctggtatcctcatcatgatggaaaaaatacattgaaccaagggatcctccctccccttcaaggcagacgttcagtacaaacatttatgcggtaggctcagatgtcgtaatttgcacttaggtaccaggtgtcaggaaacagactaaaaagaattccaccaggctgtttggagatcctcatcttggagctttttcaaaagcggggcttcatctgcaaagggccctttcatcttgaagtttttcccctccgtctttcccctcccctggcatggacaccttgtgtttaggatcatctctgcaggtttcctaggtctgaatctgcgagtagatgaacctgcagcaagcagcgtttatggtgcttccttctccctcctctgtctcaaactgcgcaggcaagcactatgcaagcccaggccctctgctgagcggtactaaacggtcgggttttcaatcacactgaattggcaggataagaaaaataggtcagataagtatgggatgatagttgaagggaggtgaagaggctgcttctctacagaggtgaaattccagatgagtcagtctcttgggaagtgtgtttagaagggttcaggactttgtgagttagcatgaccctaaaattctaggggatttctggtgggacaatgggtggtgaattttgaagttttggagagggaagtggagcagccagcaagtaagctagccagagttttctcaagagccagctttgctcagcacactctcctgggccccaaggagtcccacggaatggggaaagtgggaaccctggagttcttgggaatcttggagcctaaagagaaaccgaggtgcaaattcatttcatggtgactgacccttgagcttaaacagaagcagcaaatgaaagaaccggacaaataaggaagggcacaagcctacccgactctatttacagtctgtaactttccactcttcctgtagtcccgaggcccctgggtccttctagcttttctctttcccatccttggggccttgtgtgatgatgggtgtggggctgccgatgggaaagtcgggggttgttaggcttttctgcctgctcctgcttaaacacaagaaggaatcctggattttgccctctccttagctcttagtctctttggtaggagttttgttccagaggagctctcccccttggatttgaacttgctctttttgttgttgttgttctttctcttctttttcttacctcccactaaaggggttccaaattatcctggtctttttctaccttgttgtgtttctatctcgtctttacttccatctgtttgtttttttctccatcagtgggggccgagttgttcccccagcctgccaaattttgatccttcccctcttttggccaaatcctagggggaagaaatcctagtatgccaaaaatatatgctaagcataattaaactccatgcgggtccataacagccaagaagcctgcaggagaaagccaagggcagttccctccgcagaacaccccatgcgtgctgagaggcgagctccttgaagaaggggctgttcttccaggaggccttattttgaactgcctcaggaccccactggagagcacagcatgccttactactgggtcatccttggtctatgtgctctgtactggaggctctgttctgcctcttatcagccaggtcaggggcacacatggcttaagtgacaaagccagaggagaagacaaccctgacagcatcacgctgcatcccattgctagcaggattggcaactcttcagacggagctgcgcttccctgcagtctagcacctctagggcctctccagactgtgccctgggagctctgggactgaaaggttaagaacataaggcaggatcagatgactctctccaagagggcaggggaattttctctccatgggccacaggggacagggctgggagaagaaatagacttgcaccttatgtcatgtaaataattgattttctagttcaagaagataatattggtagtgtgggaattggaggtaggaaggggaggaagtctgagtaagccagttggcttctaagccaaaaggattcctctttgtttatctctgagacagtccaaccttgagaatagctttaaaagggaaattaatgctgagatgataaagtccccttaagccaacaaaccctctgtagctatagaatgagtgcaggtttctattggtgtggactcagagcaatttacaagagctgttcatgcagccatccatttgtgcaaaatagggtaagaagattcaagaggatatttattacttcctcataccacatggcttttgatgattctggattctaaacaacccagaatggtcatttcaggcacaacgatactacattcgtgtgtgtctgcttttaaacttggctgggctatcagaccctattctcggctcaggttttgagaagccatcagcaaatgtgtacgtgcatgctgtagctgcagcctgcatcccttcgcctgcagcctactttggggaaataaagtgccttactgactgtagccattacagtatccaatgtcttttgacaggtgcctgtccttgaaaaacaaagtttctatttttatttttaattggtttagttcttaactgctggccaactcttacatccccagcaaatcatcgggccattggattttttccattatgttcatcacccttatatcatgtacctcagatctctctctctctcctctctctcagttatatagtttcttgtcttggactttttttttcttttctttttctttttttttttgctttaaaacaagtgtgatgccatatcaagtccatgttattctctcacagtgtactctataagaggtgtgggtgtctgtttggtcaggatgttagaaagtgctgataagtagcatgatcagtgtatgcgaaaaggtttttaggaagtatggcaaaaatgttgtattggctatgatggtgacatgatatagtcagctgccttttaagaggtcttatctgttcagtgttaagtgatttaaaaaaataataacctgttttctgactagtttaaagatggatttgaaaatggttttgaatgcaattaggttatgctatttggacaataaactcaccttgacct

SEQ ID NO: 996 - DNA, 1940 bp, Homo sapiens
gccgcactttcactctccgtcagccgcattgcccgctcggcgtccggcccccgacccgcgctcgtccgcccgcccgcccgcccgcccgcgccatgaacgccaaggtcgtggtcgtgctggtcctcgtgctgaccgcgctctgcctcagcgacgggaagcccgtcagcctgagctacagatgcccatgccgattcttcgaaagccatgttgccagagccaacgtcaagcatctcaaaattctcaacactccaaactgtgcccttcagattgtagcccggctgaagaacaacaacagacaagtgtgcattgacccgaagctaaagtggattcaggagtacctggagaaagctttaaacaagtaagcacaacagccaaaaaggactttccgctagacccactcgaggaaaactaaaaccttgtgagagatgaaagggcaaagacgtgggggagggggccttaaccatgaggaccaggtgtgtgtgtggggtgggcacattgatctgggatcgggcctgaggtttgccagcatttagaccctgcatttatagcatacggtatgatattgcagcttatattcatccatgccctgtacctgtgcacgttggaacttttattactggggtttttctaagaaagaaattgtattatcaacagcattttcaagcagttagttccttcatgatcatcacaatcatcatcattctcattctcattttttaaatcaacgagtacttcaagatctgaatttggcttgtttggagcatctcctctgctcccctggggagtctgggcacagtcaggtggtggcttaacagggagctggaaaaagtgtcctttcttcagacactgaggctcccgcagcagcgcccctcccaagaggaaggcctctgtggcactcagataccgactggggctgggcgccgccactgccttcacctcctctttcaacctcagtgattggctctgtgggctccatgtagaagccactattactgggactgtgctcagagacccctctcccagctattcctactctctccccgactccgagagcatgcttaatcttgcttctgcttctcatttctgtagcctgatcagcgccgcaccagccgggaagagggtgattgctggggctcgtgccctgcatccctctcctcccagggcctgccccacagctcgggccctctgtgagatccgtctttggcctcctccagaatggagctggccctctcctggggatgtgtaatggtccccctgcttacccgcaaaagacaagtctttacagaatcaaatgcaattttaaatctgagagctcgctttgagtgactgggttttgtgattgcctctgaagcctatgtatgccatggaggcactaacaaactctgaggtttccgaaatcagaagcgaaaaaatcagtgaataaaccatcatcttgccactaccccctcctgaagccacagcagggtttcaggttccaatcagaactgttggcaaggtgacatttccatgcataaatgcgatccacagaaggtcctggtggtatttgtaactttttgcaaggcatttttttatatatatttttgtgcacatttttttttacgtttctttagaaaacaaatgtatttcaaaatatatttatagtcgaacaattcatatatttgaagtggagccatatgaatgtcagtagtttatacttctctattatctcaaactactggcaatttgtaaagaaatatatatgatatataaatgtgattgcagcttttcaatgttagccacagtgtattttttcacttgtactaaaattgtatcaaatgtgacattatatgcactagcaataaaatgctaattgtttcatggtataaacgtcctactgtatgtgggaatttatttacctgaaataaaattcattagttgttagtgatggagcttaaaaaaaa

SEQ ID NO: 997 - DNA, 928 bp, Homo sapiens
gctgtggccctggcacctgcccctgggctgggacagcccactgttccatgctgcccaagaaggctcagcacaggcacaaaccattgcccggcactggcccgtgctgcctgagaaggattggcacgggcacagaccactgcccccacctgccctgcgccatctacccaagaaggctcggcacgggcaccaaccactgcctccaactgccccatgctgcctgagaaggcactgcacggccacccccaactgccccgcactgtccctacccgggcagccatgcgagcggctggaactctgctggccttctgctgcctggtcttgagcaccactgggggcccttccccagatacttgttcccaggaccttaactcacgtgtgaagccaggatttcctaaaacaataaagaccaatgacccaggagtcctccaagcagccagatacagtgttgaaaagttcaacaactgcacgaacgacatgttcttgttcaaggagtcccgcatcacaagggccctagttcagatagtgaaaggcctgaaatatatgctggaggtggaaattggcagaactacctgcaagaaaaaccagcacctgcgtctggatgactgtgacttccaaaccaaccacaccttgaagcagactctgagctgctactctgaagtctgggtcgtgccctggctccagcacttcgaggtgcctgttctccgttgtcactgacccccgcctcttcagcaagaccacagccatgacaaacaccaggatgcatgctccttgtcccctcccacccgcctcatgacccagcctcacagaccctctcaggcctctgacgagtgagcgggtgaagtgccactgggtcaccgcagggcagctggaatggcagcatggtagcacctcctaacagattaaatagatcacatttgcttctaaaatt

SEQ ID NO: 998 - DNA, 1859 bp, Homo sapiens
gcaggcacaaactcatccatccccagttgattggaagaaacaacgatgactcctgggaagacctcattggtgtcactgctactgctgctgagcctggaggccatagtgaaggcaggaatcacaatcccacgaaatccaggatgcccaaattctgaggacaagaacttcccccggactgtgatggtcaacctgaacatccataaccggaataccaataccaatcccaaaaggtcctcagattactacaaccgatccacctcaccttggaatctccaccgcaatgaggaccctgagagatatccctctgtgatctgggaggcaaagtgccgccacttgggctgcatcaacgctgatgggaacgtggactaccacatgaactctgtccccatccagcaagagatcctggtcctgcgcagggagcctccacactgccccaactccttccggctggagaagatactggtgtccgtgggctgcacctgtgtcaccccgattgtccaccatgtggcctaagagctctggggagcccacactccccaaagcagttagactatggagagccgacccagcccctcaggaaccctcatccttcaaagacagcctcatttcggactaaactcattagagttcttaaggcagtttgtccaattaaagcttcagaggtaacacttggccaagatatgagatctgaattacctttccctctttccaagaaggaaggtttgactgagtaccaatttgcttcttgtttacttttttaagggctttaagttatttatgtatttaatatgccctgagataactttggggtataagattccattttaatgaattacctactttattttgtttgtctttttaaagaagataagattctgggcttgggaattttattatttaaaaggtaaaacctgtatttatttgagctatttaaggatctatttatgtttaagtatttagaaaaaggtgaaaaagcactattatcagttctgcctaggtaaatgtaagatagaattaaatggcagtgcaaaatttctgagtctttacaacatacggatatagtatttcctcctctttgtttttaaaagttataacatggctgaaaagaaagattaaacctactttcatatgtattaatttaaattttgcaatttgttgaggttttacaagagatacagcaagtctaactctctgttccattaaacccttataataaaatccttctgtaataataaagtttcaaaagaaaatgtttatttgttctcattaaatgtattttagcaaactcagctcttccctattgggaagagttatgcaaattctcctataagcaaaacaaagcatgtctttgagtaacaatgacctggaaatacccaaaattccaagttctcgatttcacatgccttcaagactgaacaccgactaaggttttcatactattagccaatgctgtagacagaagcattttgataggaatagagcaaataagataatggccctgaggaatggcatgtcattattaaagatcatatggggaaaatgaaaccctccccaaaatacaagaagttctgggaggagacattgtcttcagactacaatgtccagtttctcccctagactcaggcttcctttggagattaaggcccctcagagatcaacagaccaacatttttctcttcctcaagcaacactcctagggcctggcttctgtctgatcaaggcaccacacaacccagaaaggagctgatggggcagaacgaactttaagtatgagaaaagttcagcccaagtaaaataaaaactcaatcacattcaattccagagtagtttcaagtttcacatcgtaaccattttcgccc

SEQ ID NO: 999 - DNA, 8765 bp, Homo sapiens
ggacagcgccgaggaggaagaggttgatggcggcggcggagctccgagagacctcggctgggcaggggccggccgtggcgggccggggactgcgcctctagagccgcgagttctcgggaattcgccgcagcggacgcgctcggcgaatttgtgctcttgtgccctcctccgggcttgggcccaggcccggcccctcgcacttgcccttaccttttctatcgagtccgcatccctctccagccactgcgacccggcgaagagaaaaaggaacttcccccaccccctcgggtgccgtcggagccccccagcccacccctgggtgcggcgcggggaccccgggccgaagaagagatttcctgaggattctggttttcctcgcttgtatctccgaaagaattaaaaatggccgagaatgtggtggaaccggggccgccttcagccaagcggcctaaactctcatctccggccctctcggcgtccgccagcgatggcacagattttggctctctatttgacttggagcacgacttaccagatgaattaatcaactctacagaattgggactaaccaatggtggtgatattaatcagcttcagacaagtcttggcatggtacaagatgcagcttctaaacataaacagctgtcagaattgctgcgatctggtagttcccctaacctcaatatgggagttggtggcccaggtcaagtcatggccagccaggcccaacagagcagtcctggattaggtttgataaatagcatggtcaaaagcccaatgacacaggcaggcttgacttctcccaacatggggatgggcactagtggaccaaatcagggtcctacgcagtcaacaggtatgatgaacagtccagtaaatcagcctgccatgggaatgaacacagggatgaatgcgggcatgaatcctggaatgttggctgcaggcaatggacaagggataatgcctaatcaagtcatgaacggttcaattggagcaggccgagggcgacagaatatgcagtacccaaacccaggcatgggaagtgctggcaacttactgactgagcctcttcagcagggctctccccagatgggaggacaaacaggattgagaggcccccagcctcttaagatgggaatgatgaacaaccccaatccttatggttcaccatatactcagaatcctggacagcagattggagccagtggccttggtctccagattcagacaaaaactgtactatcaaataacttatctccatttgctatggacaaaaaggcagttcctggtggaggaatgcccaacatgggtcaacagccagccccgcaggtccagcagccaggcctggtgactccagttgcccaagggatgggttctggagcacatacagctgatccagagaagcgcaagctcatccagcagcagcttgttctccttttgcatgctcacaagtgccagcgccgggaacaggccaatggggaagtgaggcagtgcaaccttccccactgtcgcacaatgaagaatgtcctaaaccacatgacacactgccagtcaggcaagtcttgccaagtggcacactgtgcatcttctcgacaaatcatttcacactggaagaattgtacaagacatgattgtcctgtgtgtctccccctcaaaaatgctggtgataagagaaatcaacagccaattttgactggagcacccgttggacttggaaatcctagctctctaggggtgggtcaacagtctgcccccaacctaagcactgttagtcagattgatcccagctccatagaaagagcctatgcagctcttggactaccctatcaagtaaatcagatgccgacacaaccccaggtgcaagcaaagaaccagcagaatcagcagcctgggcagtctccccaaggcatgcggcccatgagcaacatgagtgctagtcctatgggagtaaatggaggtgtaggagttcaaacgccgagtcttctttctgactcaatgttgcattcagccataaattctcaaaacccaatgatgagtgaaaatgccagtgtgccctccctgggtcctatgccaacagcagctcaaccatccactactggaattcggaaacagtggcacgaagatattactcaggatcttcgaaatcatcttgttcacaaactcgtccaagccatatttcctacgccggatcctgctgctttaaaagacagacggatggaaaacctagttgcatatgctcggaaagttgaaggggacatgtatgaatctgcaaacaatcgagcggaatactaccaccttctagctgagaaaatctataagatccagaaagaactagaagaaaaacgaaggaccagactacagaagcagaacatgctaccaaatgctgcaggcatggttccagtttccatgaatccagggcctaacatgggacagccgcaaccaggaatgacttctaatggccctctacctgacccaagtatgatccgtggcagtgtgccaaaccagatgatgcctcgaataactccacaatctggtttgaatcaatttggccagatgagcatggcccagccccctattgtaccccggcaaacccctcctcttcagcaccatggacagttggctcaacctggagctctcaacccgcctatgggctatgggcctcgtatgcaacagccttccaaccagggccagttccttcctcagactcagttcccatcacagggaatgaatgtaacaaatatccctttggctccgtccagcggtcaagctccagtgtctcaagcacaaatgtctagttcttcctgcccggtgaactctcctataatgcctccagggtctcaggggagccacattcactgtccccagcttcctcaaccagctcttcatcagaattcaccctcgcctgtacctagtcgtacccccacccctcaccatactcccccaagcataggggctcagcagccaccagcaacaacaattccagcccctgttcctacacctcctgccatgccacctgggccacagtcccaggctctacatccccctccaaggcagacacctacaccaccaacaacacaacttccccaacaagtgcagccttcacttcctgctgcaccttctgctgaccagccccagcagcagcctcgctcacagcagagcacagcagcgtctgttcctaccccaacagcaccgctgcttcctccgcagcctgcaactccactttcccagccagctgtaagcattgaaggacaggtatcaaatcctccatctactagtagcacagaagtgaattctcaggccattgctgagaagcagccttcccaggaagtgaagatggaggccaaaatggaagtggatcaaccagaaccagcagatactcagccggaggatatttcagagtctaaagtggaagactgtaaaatggaatctaccgaaacagaagagagaagcactgagttaaaaactgaaataaaagaggaggaagaccagccaagtacttcagctacccagtcatctccggctccaggacagtcaaagaaaaagattttcaaaccagaagaactacgacaggcactgatgccaactttggaggcactttaccgtcaggatccagaatcccttccctttcgtcaacctgtggaccctcagcttttaggaatccctgattactttgatattgtgaagagccccatggatctttctaccattaagaggaagttagacactggacagtatcaggagccctggcagtatgtcgatgatatttggcttatgttcaataatgcctggttatataaccggaaaacatcacgggtatacaaatactgctccaagctctctgaggtctttgaacaagaaattgacccagtgatgcaaagccttggatactgttgtggcagaaagttggagttctctccacagacactgtgttgctacggcaaacagttgtgcacaatacctcgtgatgccacttattacagttaccagaacaggtatcatttctgtgagaagtgtttcaatgagatccaaggggagagcgtttctttgggggatgacccttcccagcctcaaactacaataaataaagaacaattttccaagagaaaaaatgacacactggatcctgaactgtttgttgaatgtacagagtgcggaagaaagatgcatcagatctgtgtccttcaccatgagatcatctggcctgctggattcgtctgtgatggctgtttaaagaaaagtgcacgaactaggaaagaaaataagttttctgctaaaaggttgccatctaccagacttggcacctttctagagaatcgtgtgaatgactttctgaggcgacagaatcaccctgagtcaggagaggtcactgttagagtagttcatgcttctgacaaaaccgtggaagtaaaaccaggcatgaaagcaaggtttgtggacagtggagagatggcagaatcctttccataccgaaccaaagccctctttgcctttgaagaaattgatggtgttgacctgtgcttctttggcatgcatgttcaagagtatggctctgactgccctccacccaaccagaggagagtatacatatcttacctcgatagtgttcatttcttccgtcctaaatgcttgaggactgcagtctatcatgaaatcctaattggatatttagaatatgtcaagaaattaggttacacaacagggcatatttgggcatgtccaccaagtgagggagatgattatatcttccattgccatcctcctgaccagaagatacccaagcccaagcgactgcaggaatggtacaaaaaaatgcttgacaaggctgtatcagagcgtattgtccatgactacaaggatatttttaaacaagctactgaagatagattaacaagtgcaaaggaattgccttatttcgagggtgatttctggcccaatgttctggaagaaagcattaaggaactggaacaggaggaagaagagagaaaacgagaggaaaacaccagcaatgaaagcacagatgtgaccaagggagacagcaaaaatgctaaaaagaagaataataagaaaaccagcaaaaataagagcagcctgagtaggggcaacaagaagaaacccgggatgcccaatgtatctaacgacctctcacagaaactatatgccaccatggagaagcataaagaggtcttctttgtgatccgcctcattgctggccctgctgccaactccctgcctcccattgttgatcctgatcctctcatcccctgcgatctgatggatggtcgggatgcgtttctcacgctggcaagggacaagcacctggagttctcttcactccgaagagcccagtggtccaccatgtgcatgctggtggagctgcacacgcagagccaggaccgctttgtctacacctgcaatgaatgcaagcaccatgtggagacacgctggcactgtactgtctgtgaggattatgacttgtgtatcacctgctataacactaaaaaccatgaccacaaaatggagaaactaggccttggcttagatgatgagagcaacaaccagcaggctgcagccacccagagcccaggcgattctcgccgcctgagtatccagcgctgcatccagtctctggtccatgcttgccagtgtcggaatgccaattgctcactgccatcctgccagaagatgaagcgggttgtgcagcataccaagggttgcaaacggaaaaccaatggcgggtgccccatctgcaagcagctcattgccctctgctgctaccatgccaagcactgccaggagaacaaatgcccggtgccgttctgcctaaacatcaagcagaagctccggcagcaacagctgcagcaccgactacagcaggcccaaatgcttcgcaggaggatggccagcatgcagcggactggtgtggttgggcagcaacagggcctcccttcccccactcctgccactccaacgacaccaactggccaacagccaaccaccccgcagacgccccagcccacttctcagcctcagcctacccctcccaatagcatgccaccctacttgcccaggactcaagctgctggccctgtgtcccagggtaaggcagcaggccaggtgacccctccaacccctcctcagactgctcagccaccccttccagggcccccacctgcagcagtggaaatggcaatgcagattcagagagcagcggagacgcagcgccagatggcccacgtgcaaatttttcaaaggccaatccaacaccagatgcccccgatgactcccatggcccccatgggtatgaacccacctcccatgaccagaggtcccagtgggcatttggagccagggatgggaccgacagggatgcagcaacagccaccctggagccaaggaggattgcctcagccccagcaactacagtctgggatgccaaggccagccatgatgtcagtggcccagcatggtcaacctttgaacatggctccacaaccaggattgggccaggtaggtatcagcccactcaaaccaggcactgtgtctcaacaagccttacaaaaccttttgcggactctcaggtctcccagctctcccctgcagcagcaacaggtgcttagtatccttcacgccaacccccagctgttggctgcattcatcaagcagcgggctgccaagtatgccaactctaatccacaacccatccctgggcagcctggcatgccccaggggcagccagggctacagccacctaccatgccaggtcagcagggggtccactccaatccagccatgcagaacatgaatccaatgcaggcgggcgttcagagggctggcctgccccagcagcaaccacagcagcaactccagccacccatgggagggatgagcccccaggctcagcagatgaacatgaaccacaacaccatgccttcacaattccgagacatcttgagacgacagcaaatgatgcaacagcagcagcaacagggagcagggccaggaataggccctggaatggccaaccataaccagttccagcaaccccaaggagttggctacccaccacagcagcagcagcggatgcagcatcacatgcaacagatgcaacaaggaaatatgggacagataggccagcttccccaggccttgggagcagaggcaggtgccagtctacaggcctatcagcagcgactccttcagcaacagatggggtcccctgttcagcccaaccccatgagcccccagcagcatatgctcccaaatcaggcccagtccccacacctacaaggccagcagatccctaattctctctccaatcaagtgcgctctccccagcctgtcccttctccacggccacagtcccagcccccccactccagtccttccccaaggatgcagcctcagccttctccacaccacgtttccccacagacaagttccccacatcctggactggtagctgcccaggccaaccccatggaacaagggcattttgccagcccggaccagaattcaatgctttctcagcttgctagcaatccaggcatggcaaacctccatggtgcaagcgccacggacctgggactcagcaccgataactcagacttgaattcaaacctctcacagagtacactagacatacactagagacaccttgtagtattttgggagcaaaaaaattattttctcttaacaagactttttgtactgaaaacaatttttttgaatctttcgtagcctaaaagacaattttccttggaacacataagaactgtgcagtagccgtttgtggtttaaagcaaacatgcaagatgaacctgagggatgatagaatacaaagaatatatttttgttatggctggttaccaccagcctttcttcccctttgtgtgtgtggttcaagtgtgcactgggaggaggctgaggcctgtgaagccaaacaatatgctcctgccttgcacctccaataggttttattattttttttaaattaatgaacatatgtaatattaatagttattatttactggtgcagatggttgacatttttccctattttcctcactttatggaagagttaaaacatttctaaaccagaggacaaaaggggttaatgttactttaaaattacattctatatatatataaatatatataaatatatattaaaataccagttttttttctctgggtgcaaagatgttcattcttttaaaaaatgtttaaaaaaaaaaaaaaactgcctttcttcccctcaagtcaacttttgtgctccagaaaattttctattctgtaagtctgagcgtaaaacttcaagtattaaaataatttgtacatgtagagagaaaaatgactttttcaaaaatatacaggggcagctgccaaattgatgtattatatattgtggtttctgtttcttgaaagaatttttttcgttatttttacatctaacaaagtaaaaaaattaaaaagagggtaagaaacgattccggtgggatgattttaacatgcaaaatgtccctgggggtttcttctttgcttgctttcttcctccttaccctaccccccactcacacacacacacacacacacacacacacacacacacacacactttctataaaacttgaaaatagcaaaaaccctcaactgttgtaaatcatgcaattaaagttgattacttataaatatgaactttggatcactgtatagactgttaaatttgatttcttattacctattgttaaataaactgtgtgagacag

SEQ ID NO: 1000 - DNA, 1958 bp, Homo sapiens
agcagccggcgcggccgccagcgcggtgtagggggcaggcgcggatcccgccaccgccgcgcgctcggcccgccgactcccggcgccgccgccgccactgccgtcgccgccgccgcctgccgggactggagcgcgccgtccgccgcggacaagaccctggcctcaggccggagcagccccatcatgccgagggagcgcagggagcgggatgcgaaggagcgggacaccatgaaggaggacggcggcgcggagttctcggctcgctccaggaagaggaaggcaaacgtgaccgtttttttgcaggatccagatgaagaaatggccaaaatcgacaggacggcgagggaccagtgtgggagccagccttgggacaataatgcagtctgtgcagacccctgctccctgatccccacacctgacaaagaagatgatgaccgggtttacccaaactcaacgtgcaagcctcggattattgcaccatccagaggctccccgctgcctgtactgagctgggcaaatagagaggaagtctggaaaatcatgttaaacaaggaaaagacatacttaagggatcagcactttcttgagcaacaccctcttctgcagccaaaaatgcgagcaattcttctggattggttaatggaggtgtgtgaagtctataaacttcacagggagaccttttacttggcacaagatttctttgaccggtatatggcgacacaagaaaatgttgtaaaaactcttttacagcttattgggatttcatctttatttattgcagccaaacttgaggaaatctatcctccaaagttgcaccagtttgcgtatgtgacagatggagcttgttcaggagatgaaattctcaccatggaattaatgattatgaaggcccttaagtggcgtttaagtcccctgactattgtgtcctggctgaatgtatacatgcaggttgcatatctaaatgacttacatgaagtgctactgccgcagtatccccagcaaatctttatacagattgcagagctgttggatctctgtgtcctggatgttgactgccttgaatttccttatggtatacttgctgcttcggccttgtatcatttctcgtcatctgaattgatgcaaaaggtttcagggtatcagtggtgcgacatagagaactgtgtcaagtggatggttccatttgccatggttataagggagacggggagctcaaaactgaagcacttcaggggcgtcgctgatgaagatgcacacaacatacagacccacagagacagcttggatttgctggacaaagcccgagcaaagaaagccatgttgtctgaacaaaatagggcttctcctctccccagtgggctcctcaccccgccacagagcggtaagaagcagagcagcgggccggaaatggcgtgaccaccccatccttctccaccaaagacagttgcgcgcctgctccacgttctcttctgtctgttgcagcggaggcgtgcgtttgcttttacagatatctgaatggaagagtgtttcttccacaacagaagtatttctgtggatggcatcaaacagggcaaagtgttttttattgaatgcttataggttttttttaaataagtgggtcaagtacaccagccacctccagacaccagtgcgtgctcccgatgctgctatggaaggtgctacttgacctaagggactcccacaacaacaaaagcttgaagctgtggagggccacggtggcgtggctctcctcgcaggtgttctgggctccgttgtaccaagtggagcaggtggttgcgggcaagcgttgtgcagagcccatagccagctgggcagggggctgccctctccacattatcagttgacagtgtacaatgcctttgatgaactgttttgtaagtgctgctatatctatccattttttaataaagataatactgtttttgagacaaaaaaaa

SEQ ID NO: 1001 - DNA, 2549 bp, Homo sapiens
ggagcgcttaagaggagggtcgggctcggccggggagtcccagtggcggaggctacgaaacttgggggagtgcacagaagaacttcgggagcgcacgcgggaccagggaccaggctgagactcggggcgccagtccgggcaggggcagcgggagccggccggagatgccctgtatccaagcccaatatgggacaccagcaccgagtccgggaccccgtgaccacctggcaagcgaccccctgacccctgagttcatcaagcccaccatggacctggccagccccgaggcagcccccgctgcccccactgccctgcccagcttcagcaccttcatggacggctacacaggagagtttgacaccttcctctaccagctgccaggaacagtccagccatgctcctcagcctcctcctcggcctcctccacatcctcgtcctcagccacctcccctgcctctgcctccttcaagttcgaggacttccaggtgtacggctgctaccccggccccctgagcggcccagtggatgaggccctgtcctccagtggctctgactactatggcagcccctgctcggccccgtcgccctccacgcccagcttccagccgccccagctctctccctgggatggctccttcggccacttctcgcccagccagacttacgaaggcctgcgggcatggacagagcagctgcccaaagcctctgggcccccacagcctccagccttcttttccttcagtcctcccaccggccccagccccagcctggcccagagccccctgaagttgttcccctcacaggccacccaccagctgggggagggagagagctattccatgcctacggccttcccaggtttggcacccacttctccacaccttgagggctcggggatactggatacacccgtgacctcaaccaaggcccggagcggggccccaggtggaagtgaaggccgctgtgctgtgtgtggggacaacgcttcatgccagcattatggtgtccgcacatgtgagggctgcaagggcttcttcaagcgcacagtgcagaaaaacgccaagtacatctgcctggctaacaaggactgccctgtggacaagaggcggcgaaaccgctgccagttctgccgcttccagaagtgcctggcggtgggcatggtgaaggaagttgtccgaacagacagcctgaaggggcggcggggccggctaccttcaaaacccaagcagcccccagatgcctcccctgccaatctcctcacttccctggtccgtgcacacctggactcagggcccagcactgccaaactggactactccaagttccaggagctggtgctgccccactttgggaaggaagatgctggggatgtacagcagttctacgacctgctctccggttctctggaggtcatccgcaagtgggcggagaagatccctggctttgctgagctgtcaccggctgaccaggacctgttgctggagtcggccttcctggagctcttcatcctccgcctggcgtacaggtctaagccaggcgagggcaagctcatcttctgctcaggcctggtgctacaccggctgcagtgtgcccgtggcttcggggactggattgacagtatcctggccttctcaaggtccctgcacagcttgcttgtcgatgtccctgccttcgcctgcctctctgcccttgtcctcatcaccgaccggcatgggctgcaggagccgcggcgggtggaggagctgcagaaccgcatcgccagctgcctgaaggagcacgtggcagctgtggcgggcgagccccagccagccagctgcctgtcacgtctgttgggcaaactgcccgagctgcggaccctgtgcacccagggcctgcagcgcatcttctacctcaagctggaggacttggtgccccctccacccatcattgacaagatcttcatggacacgctgcccttctgacccctgcctgggaacacgtgtgcacatgcgcactctcatatgccaccccatgtgcctttagtccacggacccccagagcacccccaagcctgggcttgagctgcagaatgactccaccttctcacctgctccaggaggtttgcagggagctcaagcccttggggagggggatgccttcatgggggtgaccccacgatttgtcttatcccccccagcctggccccggcctttatgttttttgtaagataaaccgtttttaacacatagcgccgtgctgtaaataagcccagtgctgctgtaaatacaggaagaaagagcttgaggtgggagcggggctgggaggaagggatgggccccgccttcctgggcagcctttccagcctcctgctggctctctcttcctaccctccttccacatgtacataaactgtcactctaggaagaagacaaatgacagattctgacatttatatttgtgtattttcctggatttatagtatgtgacttttctgattaatatatttaatatattgaataaaaaatagacatgtagttggaaaaaaaaaaaaaaaaaaaaaaaaaaaaaaa

SEQ ID NO: 1002 - DNA, 2640 bp, Homo sapiens
actcgccgcagcctgcgcgccttctccagtccgcggtgccatggcccccgcccgtctgttcgcgctgctgctgttcttcgtaggcggagtcgccgagtcgatccgagagactgaggtcatcgacccccaggacctcctagaaggccgatacttctccggagccctaccagacgatgaggatgtagtggggcccgggcaggaatctgatgactttgagctgtctggctctggagatctggatgacttggaagactccatgatcggccctgaagttgtccatcccttggtgcctctagataaccatatccctgagagggcagggtctgggagccaagtccccaccgaacccaagaaactagaggagaatgaggttatccccaagagaatctcacccgttgaagagagtgaggatgtgtccaacaaggtgtcaatgtccagcactgtgcagggcagcaacatctttgagagaacggaggtcctggcagctctgattgtgggtggcatcgtgggcatcctctttgccgtcttcctgatcctactgctcatgtaccgtatgaagaagaaggatgaaggcagctatgacctgggcaagaaacccatctacaagaaagcccccaccaatgagttctacgcgtgaagcttgcttgtgggcactggcttggactttagcggggagggaagccaggggattttgaagggtggacattagggtagggtgaggtcaacctaatactgacttgtcagtatctccagctctgattacctttgaagtgttcagaagagacattgtcttctactgttctgccaggttcttcttgagctttgggcctcagttgccctggcagaaaaatggattcaacttggcctttctgaaggcaagactgggattggatcacttcttaaacttccagttaagaatctaggtccgccctcaagcccatactgaccatgcctcatccagagctcctctgaagccagggggctaacggatgttgtgtggagtcctggctggaggtcctcccccagtggccttcctcccttcctttcacagccggtctctctgccaggaaatgggggaaggaactagaaccacctgcaccttgagatgtttctgtaaatgggtacttgtgatcacactacgggaatctctgtggtatatacctggggccattctaggctctttcaagtgacttttggaaatcaaccttttttatttgggggggaggatggggaaaagagctgagagtttatgctgaaatggatttatagaatatttgtaaatctatttttagtgtttgttcgtttttttaactgttcattcctttgtgcagagtgtatatctctgcctgggcaagagtgtggaggtgccgaggtgtcttcattctctcgcacatttccacagcacctgctaagtttgtatttaatggtttttgtttttgtttttgtttgtttcttgaaaatgagagaagagccggagagatgatttttattaattttttttttttttttttttttttactatttatagctttagatagggcctcccttcccctcttctttctttgttctctttcattaaaccccttccccagttttttttttatactttaaaccccgctcctcatggccttggccctttctgaagctgcttcctcttataaaatagcttttgccgaaacatagtttttttttagcagatcccaaaatataatgaaggggatggtgggatatttgtgtctgtgttcttataatatattattattcttccttggttctagaaaaatagataaatatatttttttcaggaaatagtgtggtgtttccagtttgatgttgctgggtggttgagtgagtgaattttcatgtggctgggtgggtttttgcctttttctcttgccctgttcctggtgccttctgatggggctggaatagttgaggtggatggttctaccctttctgccttctgtttgggacccagctggtgttctttggtttgctttcttcaggctctagggctgtgctatccaatacagtaaccacatgcggctgtttaaagttaagccaattaaaatcacataagattaaaaattccttcctcagttgcactaaccacgtttctagaggcgtcactgtatgtagttcatggctactgtactgacagcgagagcatgtccatctgttggacagcactattctagagaactaaactggcttaacgagtcacagcctcagctgtgctgggacgacccttgtctccctgggtaggggggggggaatgggggagggctgatgaggccccagctggggcctgttgtctgggaccctccctctcctgagaggggaggcctggtggcttagcctgggcaggtcgtgtctcctcctgaccccagtggctgcggtgaggggaaccaccctcccttgctgcaccagtggccattagctcccgtcaccactgcaacccagggtcccagctggctgggtcctcttctgcccccagtgcccttccccttgggctgtgttggagtgagcacctcctctgtaggcacctctcacactgttgtctgttactgattttttttgataaaaagataataaaacctggtactttctaaaaaaaaaaaaaaaaaaaaaaaaaaaaaa

SEQ ID NO: 1003 - DNA, 1282 bp, Homo sapiens
aagccacccagcctatgcatccgctcctcaatcctctcctgttggcactgggcctcatggcgcttttgttgaccacggtcattgctctcacttgccttggcggctttgcctccccaggccctgtgcctccctctacagccctcagggagctcattgaggagctggtcaacatcacccagaaccagaaggctccgctctgcaatggcagcatggtatggagcatcaacctgacagctggcatgtactgtgcagccctggaatccctgatcaacgtgtcaggctgcagtgccatcgagaagacccagaggatgctgagcggattctgcccgcacaaggtctcagctgggcagttttccagcttgcatgtccgagacaccaaaatcgaggtggcccagtttgtaaaggacctgctcttacatttaaagaaactttttcgcgagggacagttcaactgaaacttcgaaagcatcattatttgcagagacaggacctgactattgaagttgcagattcatttttctttctgatgtcaaaaatgtcttgggtaggcgggaaggagggttagggaggggtaaaattccttagcttagacctcagcctgtgctgcccgtcttcagcctagccgacctcagccttccccttgcccagggctcagcctggtgggcctcctctgtccagggccctgagctcggtggacccagggatgacatgtccctacacccctcccctgccctagagcacactgtagcattacagtgggtgccccccttgccagacatgtggtgggacagggacccacttcacacacaggcaactgaggcagacagcagctcaggcacacttcttcttggtcttatttattattgtgtgttatttaaatgagtgtgtttgtcaccgttggggattggggaagactgtggctgctagcacttggagccaagggttcagagactcagggccccagcactaaagcagtggacaccaggagtccctggtaataagtactgtgtacagaattctgctacctcactggggtcctggggcctcggagcctcatccgaggcagggtcaggagaggggcagaacagccgctcctgtctgccagccagcagccagctctcagccaacgagtaatttattgtttttccttgtatttaaatattaaatatgttagcaaagagttaatatatagaagggtaccttgaacactgggggaggggacattgaacaagttgtttcattgactatcaaactgaagccagaaataaagttggtgacagat

SEQ ID NO: 1004 - DNA, 1656 bp, Homo sapiens
cgcccctgctctcgcgccggcgtcggctgcgtctccggcgtttgaattgcgcttccgccatctttccagcctcagtcggacgggcgcggaggcgcttctggaaggaacgccgcgatggctgcgcagggagagccccaggtccagttcaaacttgtattggttggtgatggtggtactggaaaaacgaccttcgtgaaacgtcatttgactggtgaatttgagaagaagtatgtagccaccttgggtgttgaggttcatcccctagtgttccacaccaacagaggacctattaagttcaatgtatgggacacagccggccaggagaaattcggtggactgagagatggctattatatccaagcccagtgtgccatcataatgtttgatgtaacatcgagagttacttacaagaatgtgcctaactggcatagagatctggtacgagtgtgtgaaaacatccccattgtgttgtgtggcaacaaagtggatattaaggacaggaaagtgaaggcgaaatccattgtcttccaccgaaagaagaatcttcagtactacgacatttctgccaaaagtaactacaactttgaaaagcccttcctctggcttgctaggaagctcattggagaccctaacttggaatttgttgccatgcctgctctcgccccaccagaagttgtcatggacccagctttggcagcacagtatgagcacgacttagaggttgctcagacaactgctctcccggatgaggatgatgacctgtgagaatgaagctggagcccagcgtcagaagtctagttttataggcagctgtcctgtgatgtcagcggtgcagcgtgtgtgccacctcattattatctagctaagcggaacatgtgctttatctgtgggatgctgaaggagatgagtgggcttcggagtgaatgtggcagtttaaaaaataacttcattgtttggacctgcatatttagctgtttggacgcagttgattccttgagtttcatatataagactgctgcagtcacatcacaatattcagtggtgaaatcttgtttgttactgtcattcccattccttttctttagaatcagaataaagttgtatttcaaatatctaagcaagtgaactcatcccttgtttataaatagcatttggaaaccactaaagtagggaagttttatgccatgttaatatttgaattgccttgcttttatcacttaatttgaaatctattgggttaatttctccctatgtttatttttgtacatttgagccatgtcacacaaactgatgatgacaggtcagcagtattctatttggttagaagggttacatggtgtaaatattagtgcagttaagctaaagcagtgtttgctccaccttcatattggctaggtagggtcacctagggaagcacttgctcaaaatctgtgacctgtcagaataaaaatgtggtttgtacatatcaaatagatattttaagggtaatattttcttttatggcaaaagtaatcatgttttaatgtagaacctcaaacaggatggaacatcagtggatggcaggaggttgggaattcttgctgttaaaaataattacaaattttgcactttttgtttgaatgttagatgcttagtgtgaagttgatacgcaagccg

SEQ ID NO: 1005 - DNA, 3236 bp, Homo sapiens
agagccaggaagcgggagccgggacccagggcccgggatcgccgagcccgacctcgggcgccccgccggtcacctccgcgcggacaccagccctgcagagcccagggagatggaagacttcgcccgaggggcggcctccccaggcccctcccggcctggcctggttcccgtcagcatcatcggggctgaggatgaggattttgagaacgagctggagacaaactcagaagagcaaaacagccagttccagagcctggagcaggtgaagcggcgcccagcccacctcatggccctcctgcagcacgtggccctgcagtttgagccaggacccctgctttgctgtctgcatgccgacatgctgggctcactgggccccaaggaggccaagaaggccttcctggacttctaccacagcttcctggagaagacagcggttctccgggtgccggtccctcccaacgtcgcctttgaacttgaccgcactagggctgacctcatctccgaggatgtccagcggcggttcgtgcaggaggtggtgcaaagccagcaggtagccgtgggccggcagctggaggacttccgttccaagcggctcatgggcatgacgccctgggagcaggagctggcccagctggaggcttgggttgggcgggaccgagccagctacgaggcccgggagcggcacgtggcggagcggctgctcatgcacctggaggagatgcaacataccatctctaccgacgaagaaaagagtgctgccgtggtcaacgccattggcctgtacatgcgccaccttggggtgcggaccaagagtggagacaagaagtcggggaggaacttcttccggaaaaaggtgatggggaaccggcggtcggacgagcctgccaagaccaagaaggggctgagcagcatcctggatgccgcccgctggaaccggggagagccccaggttccagattttcgacacctcaaagcagaggttgatgccgagaagccaggtgctacagaccggaagggaggcgtggggatgccctctcgggaccggaatatcggggctcctgggcaggacacccctggagtctctctgcaccctctgtccctggacagcccagaccgggaaccaggtgctgacgcccccctggagctgggggactcatccccgcagggcccaatgagcctggagtccttggcgcccccagagagtaccgacgagggggccgaaaccgagagccccgagcctggagatgagggggagccggggcggtcgggactggagcttgaaccagaagagcctcccggctggcgggaactcgtccccccagacaccctgcacagcctgcccaagagccaggtgaagcggcaggaggtcatcagcgagctgctggtgacagaggcggcccacgtgcgcatgctgcgggtgctgcacgacctcttcttccagcccatggcagaatgcctgttcttccccttggaggagctgcagaacatcttccccagcctggacgagctcatcgaggtgcattccctgttcctcgatcgcctgatgaagcggaggcaggagagtggctacctcatcgaggagatcggagacgtgctgctggcccggtttgatggtgctgagggctcctggttccagaaaatctcctcccgcttctgcagccgccagtcatttgccttagagcagctcaaagccaagcaacgcaaggaccctcggttctgtgccttcgtgcaggaagctgagagccgcccgcggtgccgccgcctgcagctgaaggacatgatccccacggagatgcagcggctgaccaagtaccccctgctcctgcagagcatcgggcagaacacagaagagcccacagaacgggagaaagtggagctggcagccgagtgctgccgggaaattctacaccacgtcaaccaagccgtgcgtgacatggaggacctgctgaggctcaaggactatcagcggcgcctggacttgtcccaccttcggcagagcagcgaccctatgctgagcgagttcaagaacctggacatcaccaagaagaaattggtccacgagggcccactgacgtggcgggtgactaaggacaaggcagtggaggtgcatgtgctgctgctggacgacctgctgctgctgctccagcgccaggacgagcggctgctgctcaagtcccatagccggacactgacgcccacgcccgatggcaagaccatgctgcggcccgtgctgcggctcacctccgccatgacccgcgaggtggccaccgatcacaaagccttctacgtcctttttacctgggaccaggaggcccagatatacgagctggtggcacagactgtgtcggagcggaaaaactggtgtgctctcatcactgagactgccggatccctgaaagtccctgcccctgcctctcgccctaagccccggcccagcccgagcagcacccgagaacccctcctcagcagctctgagaacggcaatggtggccgagagacgtctccagctgatgcccggaccgagagaatcctcagtgacctcctgcccttctgcagaccaggccccgagggccagctcgctgccacggcccttcggaaagtgctgtccctgaagcagcttctgtttccggcggaggaagacaatggggcggggcctcctcgagatggggatggggtcccagggggcggccccctgagcccagcacggacccaggaaatccaggagaacctgctcagcttggaggagaccatgaagcagctggaggagttggaggaggaattttgccgcctgagacccctcctgtctcagcttggggggaactctgtcccccagcctggctgcacttgaggttcccgcccaggaaggccttttgcaagaaggagaggaatgggggagaggacgtgagggaccacccccacccacacagctgccgcagcatctcacaccccgagggcctgaggagagggagctgtgggccacgcctgggaggggcccagctggggttactggccccgcatgagcctcggccatctctccctcctgccctctgcttgggggactcagggctccattctggagggcaccacggtgacccgggccatctcagtattgcctgtgggggccacccctccacccccacccccaagtgccttcgctctgtttttataccctgaattggaggtttattttttaatatatattatctaagaagaaaaaaaaaaaaaaaaaaaaaaaa

SEQ ID NO: 1006 - DNA, 2090 bp, Homo sapiens
gttggcgaggagtttcctgtttcccccgcagcgctgagttgaagttgagtgagtcactcgcgcgcacggagcgacgacacccccgcgcgtgcacccgctcgggacaggagccggactcctgtgcagcttccctcggccgccgggggcctccccgcgcctcgccggcctccaggcccctcctggctggcgagcgggcgccacatctggcccgcacatctgcgctgccggcccggcgcggggtccggagagggcgcggcgcggagcgcagccaggggtccgggaaggcgccgtccgtgcgctgggggctcggtctatgacgagcagcggggtctgccatgggtcgggggctgctcaggggcctgtggccgctgcacatcgtcctgtggacgcgtatcgccagcacgatcccaccgcacgttcagaagtcggttaataacgacatgatagtcactgacaacaacggtgcagtcaagtttccacaactgtgtaaattttgtgatgtgagattttccacctgtgacaaccagaaatcctgcatgagcaactgcagcatcacctccatctgtgagaagccacaggaagtctgtgtggctgtatggagaaagaatgacgagaacataacactagagacagtttgccatgaccccaagctcccctaccatgactttattctggaagatgctgcttctccaaagtgcattatgaaggaaaaaaaaaagcctggtgagactttcttcatgtgttcctgtagctctgatgagtgcaatgacaacatcatcttctcagaagaatataacaccagcaatcctgacttgttgctagtcatatttcaagtgacaggcatcagcctcctgccaccactgggagttgccatatctgtcatcatcatcttctactgctaccgcgttaaccggcagcagaagctgagttcaacctgggaaaccggcaagacgcggaagctcatggagttcagcgagcactgtgccatcatcctggaagatgaccgctctgacatcagctccacgtgtgccaacaacatcaaccacaacacagagctgctgcccattgagctggacaccctggtggggaaaggtcgctttgctgaggtctataaggccaagctgaagcagaacacttcagagcagtttgagacagtggcagtcaagatctttccctatgaggagtatgcctcttggaagacagagaaggacatcttctcagacatcaatctgaagcatgagaacatactccagttcctgacggctgaggagcggaagacggagttggggaaacaatactggctgatcaccgccttccacgccaagggcaacctacaggagtacctgacgcggcatgtcatcagctgggaggacctgcgcaagctgggcagctccctcgcccgggggattgctcacctccacagtgatcacactccatgtgggaggcccaagatgcccatcgtgcacagggacctcaagagctccaatatcctcgtgaagaacgacctaacctgctgcctgtgtgactttgggctttccctgcgtctggaccctactctgtctgtggatgacctggctaacagtgggcaggtgggaactgcaagatacatggctccagaagtcctagaatccaggatgaatttggagaatgctgagtccttcaagcagaccgatgtctactccatggctctggtgctctgggaaatgacatctcgctgtaatgcagtgggagaagtaaaagattatgagcctccatttggttccaaggtgcgggagcacccctgtgtcgaaagcatgaaggacaacgtgttgagagatcgagggcgaccagaaattcccagcttctggctcaaccaccagggcatccagatggtgtgtgagacgttgactgagtgctgggaccacgacccagaggcccgtctcacagcccagtgtgtggcagaacgcttcagtgagctggagcatctggacaggctctcggggaggagctgctcggaggagaagattcctgaagacggctccctaaacactaccaaatagctcttatggggcaggctgggcatgtccaaagaggctgcccctctcaccaaa
